(19) United States
(12) Patent Application Publication
(10) Pub. No.: US 2024/0373832 A1
(43) Pub. Date: Nov. 14, 2024

(54) HUMAN ANTIBODIES FROM TRANSGENIC RODENTS WITH MULTIPLE HEAVY CHAIN IMMUNOGLOBULIN LOCI

(71) Applicant: OMNIAB OPERATIONS, INC., Emeryville, CA (US)

(72) Inventors: Roland BUELOW, Palo Alto, CA (US); Marianne BRUGGEMANN, Cambridge (GB); Biao MA, Cambridge (GB); Michael J. OSBORN, Sturmer (GB)

(21) Appl. No.: 18/752,374

(22) Filed: Jun. 24, 2024

Related U.S. Application Data
(62) Division of application No. 16/478,466, filed on Jul. 16, 2019, now Pat. No. 12,016,313.
(60) Provisional application No. 62/448,317, filed on Jan. 19, 2017.

(51) Int. Cl. A01K 67/0278; C12N 15/85

(52) U.S. Cl. CPC A01K 67/0278; A01K 2217/052; A01K 2217/075; A01K 2217/15; A01K 2227/105; A01K 2267/01; C12N 15/8509

(57) ABSTRACT

A polyclonal antiserum composition including a repertoire of antigen-specific artificial immunoglobulins, each antigen-specific artificial immunoglobulin including: one or more human heavy chain VH segment(s); one or more D segment(s); one or more J segment(s); and one or more constant region segment(s).

### FIELD OF INVENTION

[0001] The invention relates to transgenic animals useful for the production of immunoglobulins with human idiotypes in rodents, and methods for making the same. The invention further relates to compositions and methods for the production of humanized and fully human antibodies using polynucleotides derived from modified large regions on bacterial artificial chromosomes and their combined tandem integration. Crossbreeding of independently obtained transgenic animals allowed the expression of highly diverse human antibody repertoires using many different, potentially all, human VH, D and JH segments. Expression is managed in vivo by regulating separate integration sites in unison such as to obtain VH gene diversity and choice without interference.

### REFERENCE TO SEQUENCE LISTING

[0002] A Sequence Listing submitted as an XML file via Patent Center is hereby incorporated by reference in accordance with 35 U.S.C. § 1.52 (c). The name of the XML file for the Sequence Listing is 59939100_1.XML, the date of creation of the XML file is Aug. 2, 2024, and the size of the XML file is 2,767,489 bytes.

### BACKGROUND OF THE INVENTION

[0003] Human monoclonal antibodies have proven to be invaluable in therapeutic applications, either as IgG of conventional size, single chains or domain modules (Chan & Carter Nature reviews. Immunology 10, 301-316 (2010); Enever et al. Current opinion in biotechnology 20, 405-411 (2009)). Despite the successes there are still major shortcomings in their production, which relies either on specificity selection of available human material and subsequent modification of individual products, or the immunization of the limited availability of transgenic animals (Brüggemann et al. Part I: Selecting and shaping the antibody molecule, Selection Strategies III: Transgenic mice, in Handbook of Therapeutic Antibodies. Ed. Dübel, S. Wiley-VHC, 69-93 (2007)).

[0004] DNA rearrangement and expression of human immunoglobulin (Ig) genes in transgenic animals was pioneered over 20 years ago by stably inserting heavy-chain genes in germline configuration (Bruggemann, M. et al. PNAS 86, 6709-6713 (1989)). One problem associated with the therapeutic application of non-human immunoglobulins is the potential immunogenicity of the same in human patients. In order to reduce the immunogenicity of such preparations, various strategies for the production of chimeric, partially human (humanized) and fully human antibodies have been developed. Chimeric antibodies comprise a human constant region and a binding region encoded by non-human V-genes. The ability to produce transgenic antibodies having a human idiotype in non-human animals is particularly desirable as antigen binding determinants lie within the idiotype region, and non-human idiotypes are thought to contribute to the immunogenicity of current antibody therapeutics. Human idiotype is an especially important consideration in respect of monoclonal antibody therapeutics, which consist of a single idiotype delivered at relatively high concentration as opposed to the variety of idiotypes delivered at lower concentrations by a polyclonal antibody mixture.

[0005] Major improvements resulting in higher expression levels and exclusive production of human Ig, combined two new strategies: gene knock-out in embryonic stem (ES) cells (Kitamura et al. Nature 350, 423-426 (1991)) and locus extension on artificial chromosomes (Davies et al. Nucleic acids research 21, 767-768 (1993)). Silencing of the endogenous Ig genes by gene targeting in ES cells produced several inactive mouse lines without the ability to rearrange their IgH and IgL locus or without producing fully functional IgH, IgK or IgL products. More recently zinc finger nucleases (ZFNs) were designed to generate site-specific double-strand breaks in Ig genes, which allowed gene disruption by deletion and non-homologous DNA repair. Injection of ZFN plasmids into fertilized eggs produced Ig silenced rats and rabbits with IgH and IgL disruptions (Geurts, A. M. et al. Science 325, 433 (2009); Menoret, S. et al. European journal of immunology 40, 2932-2941 (2010); Flisikowska, T. et al. PloS one 6, e21045 (2011)).

[0006] A significant technical challenge encountered with many prior art approaches to producing humanized transgenic antibodies in non-human animals relates to the apparent competition between duplicate Ig loci in the same animal, e.g, an existing or endogenous Ig locus and an exogenous or artificial locus introduced into the transgenic animal. Historically, in the absence of effective knock-out the endogenous locus out-competes the exogenous locus for antibody production, such that the duplicate locus is effectively silenced (Lonberg et al., Nat Bio, 23, 1117, 2005; Nicholson et al. J Immunol, 163, 6898, 1999; Brüggemann et al., AITE 63, 101, 2015). In this regard, therefore, the prior art does not address or resolve whether duplicate Ig loci integrated at different chromosomal sites can act cooperatively in the production of transgenic antibodies in the same host animal, and in fact would reasonably suggest to the skilled artisan that the opposite is true.

[0007] Another technical challenge encountered with the production of transgenic antibodies having a human idiotype in non-human animals is the difficulty with providing the full complement of human immunoglobulin VDJ or VJ gene-segments used to generate the human antibodies. Some have attempted to address the problem by introducing megabase-sized fragments from the human heavy and kappa light chain loci. However, this approach has only proven successful with roughly 80% of the human immunoglobin gene included in the germ-line configuration and has relied on the use of protoplasts to deliver the large fragments of the relevant chromosomes with a yeast artificial chromosome (YAC) system (U.S. Pat. No. 5,939,598).

[0008] While integration of extensive overlapping V_{H} D J_{H} regions, such as to maintain the full functionality of the IgH locus and essential for DNA rearrangement, have been utilized in transgenic animals in order to maximize antibody diversity, the overlapping integration had primarily been reported for much smaller regions (<100 kb) (Wagner et al. Genomics 35, 405-414 (1996); Bruggemann et al. European journal of immunology 21, 1323-1326 (1991)) or with larger regions but still having a limited repertoire at a single integration site (WO2014/093908; Bruggemann et al.). At the time of filing, the common understanding in the art was that spreading or multiple integration of BAC or YAC mixtures were rare and would be a disadvantage for breeding to homozygosity. Moreover, laborious integration of large YACs into stem cells and subsequent animal derivation therefrom was more commonly performed (Mendez et al. Nature genetics 15, 146-156 (1997); Davies et al. Biotechnology (N Y) 11, 911-914 (1993)).

[0009] Optimal production of immunoglobulins or antibodies maximizing the diversity of antibodies with human idiotypes using transgenic animals with the full complement of human V-genes remains a challenge for the generation of novel specificities for therapeutic applications in a broad range of disease areas.

### SUMMARY OF INVENTION

[0010] The current invention resolves the foregoing uncertainties in the art with the provision of a transgenic animal comprising a plurality of artificial Ig heavy chain loci comprising duplicate/overlapping human immunoglobulin VDJ or VJ gene segments integrated at different chromosomal sites, and lacking the capacity to produce endogenous immunoglobulin. The method used to generate these transgenic animals comprising the insertion of two different loci in two different locations on two different chromosomes surprisingly produced functional B cells that advantageously avoids allelic exclusion and provides increased antibody diversity as a result of the full complement of human immunoglobulin VDJ heavy chain gene segments integrated into the genome of the transgenic animal.

[0011] In one aspect of the invention, novel polynucleotides are disclosed comprising nucleic acid sequences encoding chimeric immunoglobulin chains, particularly chimeric heavy chains for use in creating transgenic animals. The polynucleotides of the present invention advantageously provide optimal expression due, at least in part, to the inclusion of a 3′ enhancer since transloci lacking this 3′ enhancer result in impaired isotype switching and low lgG expression. Accordingly, in preferred embodiments the invention provides chimeric polynucleotides comprising a rat 3′ enhancer sequence, an Ig constant region gene and at least one human immunoglubulin (Ig) joining (J) region gene. In a preferred embodiment, the rat 3′ enhancer sequence comprises the sequence set forth as SEQ ID NO:1, or a portion thereof.

[0012] In one embodiment, the chimeric polynucleotides set forth herein may further comprise at least one human variable (V) gene, at least one diversity (D) gene, or a combination thereof. In one embodiment, the constant region gene of the chimeric polynucleotide is selected from the group consisting of a human constant region gene and a rat constant region gene. In a preferred embodiment, the constant region gene is a rat constant region gene. In another preferred embodiment, the constant region gene is selected from the group consisting of Cu and Cy.

[0013] In one embodiment, the chimeric polynucleotide comprises a nucleic acid sequence substantially homologous to the bacterial artificial chromosome (BAC) Annabel disclosed herein (e.g., SEQ ID NO: 10, or a portion thereof), and may optionally further comprise at least one human variable Ig gene isolatable from a BAC6-V_{H}3-11 and BAC3 construct and/or from a BAC9 and BAC14/5 construct. In a preferred embodiment, the chimeric polynucleotides contemplated herein comprise nucleic acid sequences (a) and (b) in 5′ to 3′ order: (a) a human Ig variable region comprising human V genes in natural configuration isolatable from a BAC6-V_{H}3-11 and BAC3 construct and/or a BAC9 and BAC14/5 construct, and (b) a human Ig joining region comprising human J genes in natural configuration isolatable from the BAC Annabel. In another embodiment, each of the human Ig variable region, human Ig diversity region, human Ig joining region, the Ig constant region and the rat 3′ enhancer region of a chimeric polynucleotide as disclosed herein are in the relative positions as shown in FIG. 1A. In another embodiment, a chimeric polynucleotide as disclosed has a sequence comprising or substantially homologous to the sequence set forth as SEQ ID NO:2 or a portion thereof. In another embodiment, a chimeric polynucleotide as disclosed has a sequence comprising or substantially homologous to the sequence set forth as SEQ ID NO: 11, or a portion thereof. In a further embodiment, a chimeric polynucleotide as disclosed herein comprises a rearranged V-D-J regions, wherein said rearranged V-D-J regions encode a heavy chain variable domain exon.

[0014] In one embodiment, the transgenic animal further comprises a chimeric polynucleotide wherein said human Ig V region comprises at least one human V region gene isolatable from BAC9 and/or BAC14/5. In a preferred embodiment, the chimeric polynucleotides comprise nucleic acid sequences (a) and (b) in 5′ to 3′ order: (a) a human Ig variable region comprising human V region genes in natural configuration used (or rearranged) from BAC9 and/or BAC14/5; and (b) a human Ig joining region comprising human J region genes in natural configuration used (or rearranged) from the bacterial artificial chromosome (BAC) Annabel. In another embodiment, each of the human immunoglobulin variable region (gene), the human immunoglobulin diversity region (segment), the human immunoglobulin joining region (segment), the immunoglobulin constant region gene, and the rat 3′ enhancer are in the positions shown in FIG. 1B. In another embodiment, a chimeric polynucleotide as disclosed has a sequence comprising or substantially homologous to the sequence set forth in FIG. 6. In another embodiment, a chimeric polynucleotide as disclosed has a sequence comprising or substantially homologous to the sequence set forth in FIG. 7, or a portion thereof. In a further embodiment, chimeric polynucleotides as disclosed herein may comprise rearranged V-D-J, wherein said rearranged gene segments are derived from the above SEQ ID NOs and Figures.

[0015] Also disclosed herein are polynucleotides encoding human kappa light chain genes. In one embodiment, a polynucleotide as disclosed herein has a nucleic acid sequence comprising or substantially homologous to a nucleic acid sequence selected from the group consisting of RP11-1156D9 (set forth as SEQ ID NO:3) and RP11-1134E24 (set forth as SEQ ID NO:4). In another embodiment, the isolated polynucleotide comprises nucleic acid sequences (a) and (b) in 5′ to 3′ order: (a) a human Ig variable region comprising human V genes in natural configuration isolatable from bacterial artificial chromosomes (BAC) RP11-156D9 and/or RP11-1134E24; (b) a human Ig joining region comprising human J genes in natural configuration isolatable from the bacterial artificial chromosomes (BAC) RP11-1134E24 and/or RP11-344F17 (set forth as SEQ ID NO: 5). In a preferred embodiment, each of the human Ig variable region, the human Ig joining region, and the human Ig constant region are in relative position as shown in FIG. 2. In another embodiment, a chimeric polynucleotide as disclosed has a sequence comprising or substantially homologous to the sequence set forth as SEQ ID NO:6 or a portion thereof.

[0016] Also provided herein is a rodent cell comprising one or more polynucleotides of the invention. For example, provided herein is a rodent cell comprising a polynucleotide as disclosed herein, preferably comprising a nucleic acid sequence encoding for a chimeric heavy chain, e.g., a nucleic acid sequence encoding a rat 3′ enhancer sequence, an Ig constant region gene and at least one human J region gene, and optionally, comprising a nucleic acid sequence substantially homologous to the nucleic acid sequence selected from the group consisting of RP11-1156D9, RP11-1134E24 and portions thereof. The rodent cell contemplated herein may further comprise a polynucleotide encoding a functional light chain, e.g., having a nucleic acid sequence comprising or substantially homologous to a nucleic acid sequence selected from the group consisting of the sequence shown in FIG. 2A (set forth as SEQ ID NO:6), the sequence shown in FIG. 2B (set forth as SEQ ID NO:7), and portions thereof. In one embodiment, one or more of the polynucleotides are integrated into the rodent cell genome.

[0017] In another aspect of the invention, a transgenic animal is provided which comprises at least one inactivated endogenous Ig locus and a plurality of artificial transgenic Ig heavy chain loci integrated in the animal's genome at different chromosomal sites. In one embodiment, the transgenic animal having a plurality of artificial Ig heavy chain loci comprises (i) a V-region having at least one human V gene segment encoding a germline or hypermutated human V-region amino acid sequence; (ii) one or more J gene segments; and (iii) one or more constant region gene segments, wherein said artificial Ig heavy chain loci are functional and capable of undergoing gene rearrangement and act cooperatively to produce a repertoire of artificial immunoglobulins. In another embodiment, the transgenic animal comprises the full complement of human variable heavy chain regions. In other various embodiments, the transgenic animal i) has an artificial heavy chain loci which comprises overlapping heavy chain gene segments, ii) lacks a functional endogenous Ig light chain locus and/or iii) lacks a functional endogenous Ig heavy chain locus. In yet another embodiment, the transgenic animal expresses a diverse repertoire of antibodies encoded by V-genes from transgenic immunoglobulin loci located at different chromosomal sites.

[0018] In some embodiments, the transgenic animal lacks a functional Ig light chain locus and is capable of producing heavy chain-only antibodies.

[0019] In another embodiment, the transgenic animal with at least two artificial Ig heavy chain loci has at least one artificial Ig heavy chain loci which comprises at least one human immunoglobulin (Ig) joining (J) region gene, an Ig constant region gene, and a rat 3′ enhancer. In these transgenic animals the rat 3′ enhancer may comprise the sequence set forth as SEQ ID NO:1. The transgenic animal described in the above embodiments which may further comprise at least one human Ig variable (V) region gene and/or a human Ig diversity (D) region gene. In other embodiments of the invention the constant region gene is selected from the group consisting of a human constant region gene and a rat constant region gene. In certain embodiments the constant region gene comprises a constant region gene selected from the group consisting of Cu and Cy. In various embodiments the transgenic animal comprises a nucleic acid sequence substantially homologous to bacterial artificial chromosome (BAC) Annabel, or a portion thereof.

[0020] In certain embodiments, the human Ig V region of the transgenic animal comprises at least one human V region gene isolatable from BAC6-V_{H}3-11 and/or BAC3. In a specific embodiment the transgenic animal comprises nucleic acids with (a) a human Ig variable region comprising human V region genes in natural configuration isolatable from BAC6-V_{H}3-11 and/or BAC3; and (b) a human Ig joining region comprising human J region genes in natural configuration isolatable from the bacterial artificial chromosome (BAC) Annabel, in 5′ to 3′ order. In one embodiment each of the human immunoglobulin variable region, the human immunoglobulin diversity region, the human immunoglobulin joining region, the immunoglobulin constant region, and the rat 3′ enhancer are in the relative positions shown in FIG. 1A. In another embodiment the transgenic animal has a nucleic acid sequence substantially homologous to the nucleic acid sequence set forth as SEQ ID NO:2. In yet another embodiment the transgenic animal has a nucleic acid sequence substantially homologous to the nucleic acid sequence set forth as SEQ ID NO:11. In some embodiments the transgenic animal has V-D-J regions which are rearranged and form a complete exon encoding a heavy chain variable domain.

[0021] In certain other embodiments, the transgenic animal has an human Ig V region which comprises at least one human V region gene isolatable from BAC9-V_{H}3-53 and/or BAC14/5. In a specific embodiment these transgenic animals comprises nucleic acids with (a) a human Ig variable region comprising human V region genes in natural configuration isolatable from BAC9-V_{H}3-53 and/or BAC14/5; and (b) a human Ig joining region comprising human J region genes in natural configuration isolatable from the bacterial artificial chromosome (BAC) Annabel, in 5′ to 3′ order. In one embodiment each of the human immunoglobulin variable region, the human immunoglobulin diversity region, the human immunoglobulin joining region, the immunoglobulin constant region, and the rat 3′ enhancer are in the relative positions shown in FIG. 1B. In another embodiment the transgenic animal has a nucleic acid sequence substantially homologous to the nucleic acid sequence set forth in FIG. 6. In yet another embodiment the transgenic animal has a nucleic acid sequence substantially homologous to the nucleic acid sequence set forth in FIG. 7.

[0022] In another aspect of the invention, a method for producing antibodies is provided which comprises immunizing the transgenic animal as described above with an immunogen. In one embodiment a polyclonal antisera composition is produced wherein said antisera comprise antigen-specific antibodies encoded by V-genes encoded by transgenic immunoglobulin loci located at different chromosomal sites. In another embodiment the method for producing a monoclonal antibody comprises (i) immunizing the transgenic animal described above with an immunogen, (ii) isolating a monoclonal antibody producing cell from said transgenic animal wherein said monoclonal antibody producing cell produces a monoclonal antibody that specifically binds to said immunogen; and (iii) using said monoclonal antibody producing cell to produce said monoclonal antibody that specifically binds to said immunogen, or using said monoclonal antibody producing cell to produce a hybridoma cell that produces said monoclonal antibody and using said hybridoma cell to produce said monoclonal antibody.

[0023] In another embodiment, the method for producing a monoclonal antibody, comprises (i) immunizing the transgenic animal as described above with an immunogen, (ii) isolating a monoclonal antibody producing cell from said transgenic animal wherein said monoclonal antibody producing cell produces a monoclonal antibody that specifically binds to said immunogen; (iii) isolating from said monoclonal antibody producing cell a monoclonal antibody nucleic acid which encodes said monoclonal antibody that specifically binds to said immunogen; and (iv) using said monoclonal antibody nucleic acid to produce said monoclonal antibody that specifically binds to said immunogen. In certain embodiment the monoclonal antibody has a human idiotype.

[0024] In yet another embodiment the method for producing a fully human monoclonal antibody comprises (i) immunizing the transgenic animal as described above with an immunogen, (ii) isolating a monoclonal antibody producing cell from said transgenic animal wherein said monoclonal antibody producing cell produces a monoclonal antibody that specifically binds to said immunogen; (iii) isolating from said monoclonal antibody producing cell a monoclonal antibody nucleic acid which encodes said monoclonal antibody that specifically binds to said immunogen; (iv) modifying said monoclonal antibody nucleic acid to produce a recombinant nucleic acid encoding a fully human monoclonal antibody; and (v) using said recombinant nucleic acid encoding a fully human monoclonal antibody to produce the encoded fully human monoclonal antibody.

[0025] Another aspect of the present invention is a monoclonal antibody produced by the method described above.

[0026] In yet another aspect a method for neutralizing an antigenic entity in a human body component is provided which comprises contacting said body component with a polyclonal antisera composition as described above, wherein said polyclonal antisera composition comprises immunoglobulin molecules that specifically bind and neutralize said antigenic entity. In one embodiment the method for neutralizing an antigenic entity in a human body component comprises contacting a body component with the monoclonal antibody according to the above, wherein said monoclonal antibody specifically binds to and neutralizes said antigenic entity.

### BRIEF DESCRIPTION OF THE DRAWINGS

[0027] FIG. 1A and FIG. 1B: A summary of the integrated chimeric (human, rat) and fully human Ig loci. The 2 chimeric human-rat IgH regions (FIG. 1A, HC14;

[0028] FIG. 1B, HC30) contain each 3 overlapping BACs with ≥22 different and potentially functional human V_{H} segments. In HC14 BAC6-3 has been extended with V_{H}3-11 to provide a 10.6 kb overlap to BAC3, which overlaps 11.3 kb via V_{H}6-1 with the C region BAC Hu-Rat Annabel (FIG. 1A) and in HC30 BAC9 provides an overlap of 4.6 kb to BAC14/5, which was extended by adding V_{H}3-43 followed by part of BAC5 and equipped with an overlap of 6.1 kb to Hu-Rat Annabel (FIG. 1B). The latter is chimeric and contains all human D and J_{H} segments followed by the rat C region with full enhancer sequences. Arrows indicate the VH gene usage in HC14, HC30 and HC14/HC30 combined. Fainter bands indicate less frequently expressed VH genes. Sequences were obtained by unbiased RT-PCR and NGS.

[0029] FIG. 2A: The human Igk BACs with 12 Vks and all Jks provide a ˜14 kb overlap in the Vk region and ˜40 kb in Ck to include the KDE. FIG. 2B: The human Igl region with 17 Vls and all J-Cls, including the 3′ enhancer, is from a YAC (Vincent-Fabert, C. et al. Blood 116, 1895-1898 (2010)).

[0030] FIG. 3: Depicts HC14 locus integration into chromosome 6 and HC30 locus integration into chromosome 15.

[0031] FIG. 4: Analysis by ELISA of IgM and IgG concentration in serum from HC30 and HC14/HC30 animals. Each dot (HC30) or square (HC14/HC30) represents the titre (μg/ml) of one animal. IgG is further analysed for the content of IgG1 and IgG2b.

[0032] FIG. 5: Analysis by ELISA of anti-β-gal specific antibodies from HC30 and HC14/HC30. Each dot (HC30) or square (HC14/HC30) represents the serum titre (in comparative dilution) from one animal.

[0033] FIG. 6: BAC 9 sequence (SEQ ID NOS 109-111, respectively, in order of appearance).

[0034] FIG. 7: BAC 14/5 sequence (SEQ ID NO: 112).

### DETAILED DESCRIPTION

[0035] Provided herein are chimeric polynucleotides encoding a recombinant or artificial immunoglobulin chain or loci. As described above, the chimeric polynucleotides disclosed herein are useful for the transformation of rodents to include human Ig genes and for the production of immunoglobulins or antibodies having human idiotypes using such rodents. As further provided herein, transgenic animals are generated that comprise at least three distinct transgene constructs harboring the full complement of human immunoglobulin VDJ heavy chain gene segments tandemly integrated into the genome of the transgenic animal, thereby ensuring the availability of the entire human immunoglobulin genes in germ-line configuration in a background of complete inactivation of endogenous immunoglobulin genes or locus. Unexpectedly, as demonstrated herein for the first time, a plurality of transgenic loci comprising different V-genes can act cooperatively in the expression of humanized and fully human transgenic antibodies.

### Definitions

[0036] Immunoglobulin refers to a protein consisting of one or more polypeptides substantially encoded by immunoglobulin genes. The recognized human immunoglobulin genes include the kappa, lambda, alpha (IgA1 and IgA2), gamma (IgG1, IgG2, IgG3, IgG4), delta, epsilon and mu constant region genes, as well as the myriad immunoglobulin variable region genes. Full-length immunoglobulin “light chains” (about 25 Kd, or 214 amino acids) generally comprise a variable domain encoded by an exon comprising one or more variable region gene(s) and one or more joining region gene(s) at the NH₂-terminus (about 110 amino acids) and constant domain encoded by a kappa or lambda constant region gene at the COOH-terminus. Full-length immunoglobulin “heavy chains” (about 50 Kd, or 446 amino acids), similarly comprise (1) a variable domain (about 116 amino acids) encoded by an exon comprising one or more variable region genes, one or more diversity region genes and one or more joining region genes, and (2) one of the aforementioned constant domains comprising one or more constant region genes, e.g., alpha, gamma, delta, epsilon or mu (encoding about 330 amino acids). The immunoglobulin heavy chain constant region genes encode for the antibody class, i.e., isotype (e.g., IgM or IgG1).

[0037] As used herein, the term “antibody” refers to a protein comprising at least one, and preferably two, heavy (H) chain variable domains (abbreviated herein as VH), and at least one and preferably two light (L) chain variable domains (abbreviated herein as VL). An ordinarily skilled artisan will recognize that the variable domain of an immunological chain is encoded in gene segments that must first undergo somatic recombination to form a complete exon encoding the variable domain. There are three types of regions or gene segments that undergo rearrangement to form the variable domain: the variable region comprising variable genes, the diversity region comprising diversity genes (in the case of an immunoglobulin heavy chain), and the joining region comprising joining genes. The VH and VL domains can be further subdivided into regions of hypervariability, termed “complementarity determining regions” (“CDRs”) interspersed with regions that are more conserved, termed “framework regions” (“FRs”). The extent of the FRs and CDRs has been precisely defined (see, Kabat et al. (1991) Sequences of Proteins of Immunological Interest, Fifth Edition, U.S. Department of Health and Human Services, NIH Publication No. 91-3242; and Chothia et al. (1987) J. Mol. Biol. 196:901-17, which are hereby incorporated by reference). Each VH and VL domain is generally composed of three CDRs and four FRs, arranged from amino-terminus to carboxy-terminus in the following order: FR1, CDR1, FR2, CDR2, FR3, CDR3, FR4. The antigen binding fragment of an antibody (or simply “antibody portion,” or “fragment”), as used herein, refers to one or more fragments of a full-length antibody that retain the ability to specifically bind to an antigen (e.g., CD3).

[0038] Examples of binding fragments encompassed within the term “antigen binding fragment” of an antibody include (i) an Fab fragment, a monovalent fragment consisting of the VL, VH, CL and CH1 domains; (ii) an F(ab′)₂ fragment, a bivalent fragment comprising two Fab fragments linked by a disulfide bridge at the hinge region; (iii) an Fd fragment consisting of the VH and CH1 domains; (iv) an Fv fragment consisting of the VL and VH domains of a single arm of an antibody, (v) a dAb fragment (Ward et al. (1989) Nature 341:544-46), which consists of a VH domain; and (vi) an isolated complementarity determining region (CDR). Furthermore, although the two domains of the Fv fragment, VL and VH, are coded for by separate genes, they may be joined, using recombinant methods, by a synthetic linker that enables them to be made as a single protein chain in which the VL and VH regions pair to form monovalent molecules (known as single chain Fv (scFv); see, e.g., Bird et al. (1988) Science 242:423-26; and Huston et al. (1988) Proc. Natl. Acad. Sci. USA 85:5879-83). Such single chain antibodies are also intended to be encompassed within the term “antigen binding fragment” of an antibody. These antibody fragments are obtained using conventional techniques known to those skilled in the art, and the fragments are screened for utility in the same manner as are intact antibodies.

[0039] An antibody may further include a heavy and/or light chain constant domain to thereby form a heavy and light immunoglobulin chain, respectively. In one embodiment, the antibody is a tetramer of two heavy immunoglobulin chains and two light immunoglobulin chains, wherein the heavy and light immunoglobulin chains are interconnected, e.g., by disulfide bonds. The heavy chain constant domain is comprised of three gene segments, CH1, CH2 and CH3. The light chain constant domain is comprised of one gene, CL. The variable domains of the heavy and/or light chains contain a binding domain that interacts with an antigen. The constant domains of the antibodies typically mediate the binding of the antibody to host tissues or factors, including various cells of the immune system (e.g., effector cells) and the first component (C1q) of the classical complement system.

[0040] By polynucleotide encoding an artificial immunoglobulin locus or artificial immunoglobulin chain is meant an recombinant polynucleotide comprising multiple immunoglobulin regions, e.g., a variable (V) region or gene segment comprising V genes, a joining (J) gene region or gene segment comprising J genes, a diversity (D) region or gene segment comprising D genes in the case of a heavy chain locus and/or at least one constant (C) region comprising at least one C gene. Preferably, each region of the variable domain, e.g., V, D, or J region, comprises or spans at least two genes of the same type. For example a variable region as used herein comprises at least two variable genes, a joining region comprises at least two joining genes and a diversity region comprises two diversity genes. A constant region may comprise only one constant gene, e.g. a k gene or λ gene, or multiple genes, e.g., CH1, CH2, and CH3.

[0041] “Enhancer sequences” or “enhancer” as used herein refers to sequences that have been identified near many active genes by nuclease digest and hypersensitivity to degradation. Hypersensitive sites may precede promoter sequences and the strength of their activity was correlated with the DNA sequence. Linkage to reporter genes showed elevated transcription if enhancer function was present (Mundt et al., J. Immunol., 166, 3315 [2001]). In the IgH locus two important transcription or expression regulators have been identified, Eμ and the 3′E at the end of the locus (Pettersson et al., Nature, 344, 165 [1990]). In the mouse the removal of the whole 3′ regulatory region (containing hs3a, hs1,2, hs3b and hs4) allows normal early B-cell development but abrogates class-switch recombination (Vincent-Fabert et al., Blood, 116, 1895 [2010]) and possibly prevents the optimization of somatic hypermutation (Pruzina et al., Protein Engineering, Design and Selection, 1, [2011]). The regulatory function to achieve optimal isotype expression is particularly desirable when transgenic human IgH genes are being used. Transgene constructs with incomplete 3′E region, usually only providing the hs1,2 element, led to disappointing expression levels in transgenic mice even when the endogenous IgH locus was knocked-out. As a consequence, only few antigen-specific fully human IgGs have been isolated from constructs produced in the last 20 years (Lonberg et al., Nature 368, 856 [1994]; Nicholson et al., J. Immunol., 163, 6898 [1999]; Davis et al., Cancer Metastasis Rev. 18, 421 [1999]; Pruzina et al., Protein Engineering, Design and Selection, 1, [2011]). In the rat IgH locus, the 3′E region has only been poorly analyzed. A comparison of mouse and rat sequences did not allow identification of hs4, the crucial 4^{th} element with additional important regulatory sequences further downstream (Chatterjee et al., J. Biol. Chem., 286, 29303 [2011]). The polynucleotides of the present invention advantageously provide optimal expression due, at least in part, to the inclusion of a rat 3′ enhancer since chimeric polynucleotides lacking this 3′ enhancer result in impaired isotype switching and low IgG expression. In one embodiment, the rat 3′ enhancer has a sequence comprising or substantially homologous to the sequence set forth as SEQ ID NO: 1 or a portion thereof.

[0042] As used herein, a polynucleotide having a sequence comprising or substantially homologous to a portion, e.g., less than the entirety, of second sequence (e.g., SEQ ID NO:1, SEQ ID NO:2, etc.) preferably retains the biological activity of the second sequence (e.g., retains the biological activity of a 3′ enhancer to provide optimal expression and/or isotype switching of immunoglobulins, is capable of rearrangement to provide a humanized chimeric heavy chain, etc.). In one embodiment, a nucleic acid comprising a sequence comprising or substantially homologous to a portion of SEQ ID NO: 1 comprise at least 8 kB, preferably at least 10 kB of continuous nucleic acids that are substantially homologous to SEQ ID NO:1. In another embodiment, a second nucleic acid comprising a sequence comprising or substantially homologous to a portion of SEQ ID NOs: 59 or 60 comprise at least 8 kB, preferably at least 10 kB of continuous nucleic acids that are substantially homologous to SEQ ID NOs: 59 or 60.

[0043] “Artificial Ig locus” as used herein may refer to polynucleotides that (e.g., a sequence comprising V-, D-, and/or J regions in the case of heavy chain, or V- and/or J regions in the case of light chain, and optionally a constant region for either or both a heavy and light chain) that are unrearranged, partially rearranged, or rearranged. Artificial Ig loci include artificial Ig light chain loci and artificial Ig heavy chain loci. In one embodiment, an artificial immunoglobulin locus of the invention is functional and capable of rearrangement and producing a repertoire of immunoglobulin chains. In a preferred embodiment, the variable domain or portion thereof of a polynucleotide disclosed herein comprises genes in natural configuration, i.e., naturally occurring sequences of an human Ig gene segment, degenerate forms of naturally occurring sequences of a human Ig gene segment, as well as synthetic sequences that encode a polypeptide sequence substantially identical to the polypeptide encoded by a naturally occurring sequence of a human Ig gene segment. In another preferred embodiment, the polynucleotide comprises a variable domain or portion thereof in a natural configuration found in humans. For example, a polynucleotide encoding an artificial Ig heavy chain as disclosed herein may comprise in natural configuration at least two human V genes, at least two D genes, at least two J genes or a combination thereof.

[0044] In a preferred embodiment, an artificial Ig locus comprises a non-human C region gene and is capable of producing a repertoire of immunoglobulins including chimeric immunoglobulins having a non-human C region. In one embodiment, an artificial Ig locus comprises a human C region gene and is capable of producing a repertoire of immunoglobulins including immunoglobulins having a human C region. In one embodiment, an artificial Ig locus comprises an “artificial constant region gene”, by which is meant a constant region gene comprising nucleotide sequences derived from human and non-human constant regions genes. For example, an exemplary artificial C constant region gene is a constant region gene encoding a human IgG CH1 domain and rat IgG CH2 and CH3 domain.

[0045] In some embodiments, an artificial Ig heavy chain locus lacks CH1, or an equivalent sequence that allows the resultant immunoglobulin to circumvent the typical immunoglobulin: chaperone association. Such artificial loci provide for the production of heavy chain-only antibodies in transgenic animals which lack a functional Ig light chain locus and hence do not express functional Ig light chain. Such artificial Ig heavy chain loci are used in methods contemplated herein to produce transgenic animals lacking a functional Ig light chain locus, and comprising an artificial Ig heavy chain locus, which animals are capable of producing heavy chain-only antibodies. Alternatively, an artificial Ig locus may be manipulated in situ to disrupt CH1 or an equivalent region and generate an artificial Ig heavy chain locus that provides for the production of heavy chain-only antibodies. Regarding the production of heavy chain-only antibodies in light chain-deficient mice, see for example Zou et al., JEM, 204:3271-3283, 2007.

[0046] By “human idiotype” is meant a polypeptide sequence present on a human antibody encoded by an immunoglobulin V-gene segment. The term “human idiotype” as used herein includes both naturally occurring sequences of a human antibody, as well as synthetic sequences substantially identical to the polypeptide found in naturally occurring human antibodies. By “substantially” is meant that the degree of amino acid sequence identity is at least about 85%-95%. Preferably, the degree of amino acid sequence identity is greater than 90%, more preferably greater than 95%.

[0047] By a “chimeric antibody” or a “chimeric immunoglobulin” is meant an immunoglobulin molecule comprising a portion of a human immunoglobulin polypeptide sequence (or a polypeptide sequence encoded by a human Ig gene segment) and a portion of a non-human immunoglobulin polypeptide sequence. The chimeric immunoglobulin molecules of the present invention are immunoglobulins with non-human Fc-regions or artificial Fc-regions, and human idiotypes. Such immunoglobulins can be isolated from animals of the invention that have been engineered to produce chimeric immunoglobulin molecules.

[0048] By “artificial Fc-region” is meant an Fc-region encoded by an artificial constant region gene.

[0049] The term “Ig gene segment” as used herein refers to regions of DNA encoding various portions of an Ig molecule, which are present in the germline of non-human animals and humans, and which are brought together in B cells to form rearranged Ig genes. Thus, Ig gene segments as used herein include V gene segments, D gene segments, J gene segments and C gene segments.

[0050] The term “human Ig gene segment” as used herein includes both naturally occurring sequences of a human Ig gene segment, degenerate forms of naturally occurring sequences of a human Ig gene segment, as well as synthetic sequences that encode a polypeptide sequence substantially identical to the polypeptide encoded by a naturally occurring sequence of a human Ig gene segment. By “substantially” is meant that the degree of amino acid sequence identity is at least about 85%-95%. Preferably, the degree of amino acid sequence identity is greater than 90%, more preferably greater than 95%

[0051] Polynucleotides related to the present invention may comprise DNA or RNA and may be wholly or partially synthetic. Reference to a nucleotide sequence as set out herein encompasses a DNA molecule with the specified sequence, and encompasses an RNA molecule with the specified sequence in which U is substituted for T, unless context requires otherwise.

[0052] Calculations of “homology” or “sequence identity” between two sequences (the terms are used interchangeably herein) are performed as follows. The sequences are aligned for optimal comparison purposes (e.g., gaps can be introduced in one or both of a first and a second amino acid or nucleic acid sequence for optimal alignment and non-homologous sequences can be disregarded for comparison purposes). In a preferred embodiment, the length of a reference sequence aligned for comparison purposes is at least 30%, preferably at least 40%, more preferably at least 50%, even more preferably at least 60%, and even more preferably at least 70%, 80%, 90%, 100% of the length of the reference sequence. The amino acid residues or nucleotides at corresponding amino acid positions or nucleotide positions are then compared. When a position in the first sequence is occupied by the same amino acid residue or nucleotide as the corresponding position in the second sequence, then the molecules are identical at that position (as used herein amino acid or nucleic acid “identity” is equivalent to amino acid or nucleic acid “homology”). The percent identity between the two sequences is a function of the number of identical positions shared by the sequences, taking into account the number of gaps, and the length of each gap, which need to be introduced for optimal alignment of the two sequences.

[0053] The comparison of sequences and determination of percent sequence identity between two sequences may be accomplished using a mathematical algorithm. In a preferred embodiment, the percent identity between two amino acid sequences is determined using the Needleman and Wunsch ((1970) J. Mol. Biol. 48:444-53) algorithm, which has been incorporated into the GAP program in the GCG software package (available online at gcg.com), using either a Blossum 62 matrix or a PAM250 matrix, and a gap weight of 16, 14, 12, 10, 8, 6, or 4 and a length weight of 1, 2, 3, 4, 5, or 6. In yet another preferred embodiment, the percent identity between two nucleotide sequences is determined using the GAP program in the GCG software package (available at www.gcg.com), using a NWSgapdna. CMP matrix and a gap weight of 40, 50, 60, 70, or 80 and a length weight of 1, 2, 3, 4, 5, or 6. A particularly preferred set of parameters (and the one that should be used if the practitioner is uncertain about what parameters should be applied to determine if a molecule is within a sequence identity or homology limitation of the invention) is a Blossum 62 scoring matrix with a gap penalty of 12, a gap extend penalty of 4, and a frameshift gap penalty of 5. The percent identity between two amino acid or nucleotide sequences can also be determined using the algorithm of Meyers and Miller ((1989) CABIOS 4:11-17), which has been incorporated into the ALIGN program (version 2.0), using a PAM120 weight residue table, a gap length penalty of 12 and a gap penalty of 4.

### Artificial Ig Loci

[0054] The present invention is further directed to artificial Ig loci and their use in making transgenic animals capable of producing immunoglobulins having a human idiotype. Each artificial Ig locus comprises multiple immunoglobulin gene segments, which include at least one V region gene segment, one or more J gene segments, one or more D gene segments in the case of a heavy chain locus, and one or more constant region genes. In the present invention, at least one of the V gene segments encodes a germline or hypermutated human V-region amino acid sequence. Accordingly, such transgenic animals have the capacity to produce a diversified repertoire of immunoglobulin molecules, which include antibodies having a human idiotype. In heavy chain loci human or non-human-derived D-gene segments may be included in the artificial Ig loci. The gene segments in such loci are juxtaposed with respect to each other in an unrearranged configuration (or “the germline configuration”), or in a partially or fully rearranged configuration. The artificial Ig loci have the capacity to undergo gene rearrangement (if the gene segments are not fully rearranged) in the subject animal thereby producing a diversified repertoire of immunoglobulins having human idiotypes.

[0055] Regulatory elements, like promoters, enhancers, switch regions, recombination signals, and the like, may be of human or non-human origin. What is required is that the elements be operable in the animal species concerned, in order to render the artificial loci functional. Preferred regulatory elements are described in more detail herein.

[0056] In one aspect, the invention provides transgenic constructs containing an artificial heavy chain locus capable of undergoing gene rearrangement in the host animal thereby producing a diversified repertoire of heavy chains having human idiotypes. An artificial heavy chain locus of the transgene contains a V-region with at least one human V gene segment. Preferably, the V-region includes at least about 5-100 human heavy chain V (or “VH”) gene segments. In a preferred embodiments, the V-region includes greater than 20, greater than 25, greater than 30, greater than 35, or greater than 40 VH gene segments. As described above, a human VH segment encompasses naturally occurring sequences of a human VH gene segment, degenerate forms of naturally occurring sequences of a human VH gene segment, as well as synthetic sequences that encode a polypeptide sequence substantially (i.e., at least about 85%-95%) identical to a human heavy chain V domain polypeptide.

[0057] In a preferred embodiment, the artificial heavy chain locus contains at least one or several rat constant region genes, e.g., Cδ, Cμ and Cγ (including any of the Cγ subclasses).

[0058] In another preferred embodiment, the artificial heavy chain locus contains artificial constant region genes. In a preferred embodiment, such artificial constant region genes encode a human CH1 domain and rat CH2 CH3 domains, or a human CH1 and rat CH2, CH3 and CH4 domains. A hybrid heavy chain with a human CH1 domain pairs effectively with a fully human light chain.

[0059] In a preferred embodiment, an artificial Ig locus comprises 3′ enhancer sequences, including hs1,2, hs3a, hs3b and sequences between rat Calpha and 3′hs3b.

[0060] In another preferred embodiment, the artificial heavy chain locus contains artificial constant region genes lacking CH1 domains In a preferred embodiment, such artificial constant region genes encode truncated IgM and/or IgG lacking the CH1 domain but comprising CH2, and CH3, or CH1, CH2, CH3 and CH4 domains. Heavy chains lacking CH1 domains cannot pair effectively with Ig light chains and form heavy chain only antibodies.

[0061] In another aspect, the invention provides transgenic constructs containing an artificial light chain locus capable of undergoing gene rearrangement in the host animal thereby producing a diversified repertoire of light chains having human idiotypes. An artificial light chain locus of the transgene contains a V-region with at least one human V gene segment, e.g., a V-region having at least one human VL gene and/or at least one rearranged human VJ segment. Preferably, the V-region includes at least about 5-100 human light chain V (or “VL”) gene segments. Consistently, a human VL segment encompasses naturally occurring sequences of a human VL gene segment, degenerate forms of naturally occurring sequences of a human VL gene segment, as well as synthetic sequences that encode a polypeptide sequence substantially (i.e., at least about 85%-95%) identical to a human light chain V domain polypeptide. In one embodiment, the artificial light chain Ig locus has a C-region having at least one rat C gene (e.g., rat Cλ or Cκ).

[0062] Another aspect of the present invention is directed to methods of making a transgenic vector containing an artificial Ig locus. Such methods involve isolating Ig loci or fragments thereof, and combining the same, with one or several DNA fragments comprising sequences encoding human V region elements. The Ig gene segment(s) are inserted into the artificial Ig locus or a portion thereof by ligation or homologous recombination in such a way as to retain the capacity of the locus to undergo effective gene rearrangement in the subject animal.

[0063] Preferably, a non-human Ig locus is isolated by screening a library of plasmids, cosmids, YACs or BACs, and the like, prepared from the genomic DNA of the same. YAC clones can carry DNA fragments of up to 2 megabases, thus an entire animal heavy chain locus or a large portion thereof can be isolated in one YAC clone, or reconstructed to be contained in one YAC clone. BAC clones are capable of carrying DNA fragments of smaller sizes (about 50-500 kb). However, multiple BAC clones containing overlapping fragments of an Ig locus can be separately altered and subsequently injected together into an animal recipient cell, wherein the overlapping fragments recombine in the recipient animal cell to generate a continuous Ig locus.

[0064] Human Ig gene segments can be integrated into the Ig locus on a vector (e.g., a BAC clone) by a variety of methods, including ligation of DNA fragments, or insertion of DNA fragments by homologous recombination. Integration of the human Ig gene segments is done in such a way that the human Ig gene segment is operably linked to the host animal sequence in the transgene to produce a functional humanized Ig locus, i.e., an Ig locus capable of gene rearrangement which lead to the production of a diversified repertoire of antibodies with human idiotypes. Homologous recombination can be performed in bacteria, yeast and other cells with a high frequency of homologous recombination events. Engineered YACs and BACs can be readily isolated from the cells and used in making transgenic animals

### Transgenic Animals Comprising Artificial Ig Loci and Capable of Producing Antibodies Having Human Idiotypes

[0065] In one aspect, the invention provides transgenic animals capable of producing immunoglobulins having human idiotypes, as well as methods of making the same. The transgenic animals used are selected from rodents (e.g., rats, hamsters, mice and guinea pigs).

[0066] The transgenic animals used for humanized antibody production in the invention carry germline mutations in endogenous Ig loci. In a preferred embodiment, the transgenic animals are homozygous for mutated endogenous Ig heavy chain and/or endogenous Ig light chain genes. Further, these animals carry at least two artificial heavy chain loc Ig loci that are functional and capable of producing a repertoire of immunoglobulin molecules in the transgenic animal. The artificial Ig loci used in the invention include at least one human V gene segment.

[0067] In a preferred embodiment, the transgenic animals carry at least two artificial Ig heavy chain locus and at least one artificial Ig light chain locus that are each functional and capable of producing a repertoire of immunoglobulin molecules in the transgenic animal, which repertoire of immunoglobulin molecules includes antibodies having a human idiotype. In one embodiment, artificial loci including at least one non-human C gene are used, and animals capable of producing chimeric antibodies having a human idiotype and non-human constant region are provided. In one embodiment, artificial loci including at least one human C gene are used, and animals capable of producing antibodies having a human idiotype and human constant region are provided.

[0068] In another preferred embodiment, the transgenic animals carry at least two artificial Ig heavy chain loci, and lack a functional Ig light chain locus. Such animals find use in the production of heavy chain-only antibodies.

[0069] Production of such transgenic animals involves the integration of at least two artificial heavy chain Ig loci and one or more artificial light chain Ig loci into the genome of a transgenic animal having at least one endogenous Ig locus that has been or will be inactivated by the action of one or more meganucleases. Preferably, the transgenic animals are nullizygous for endogenous Ig heavy chain and/or endogenous Ig light chain and, accordingly, incapable of producing endogenous immunoglobulins. Regardless of the chromosomal location, an artificial Ig locus of the present invention has the capacity to undergo gene rearrangement and thereby produce a diversified repertoire of immunoglobulin molecules. An Ig locus having the capacity to undergo gene rearrangement is also referred to herein as a “functional” Ig locus, and the antibodies with a diversity generated by a functional Ig locus are also referred to herein as “functional” antibodies or a “functional” repertoire of antibodies.

[0070] The artificial loci used to generate such transgenic animals each include multiple immunoglobulin gene segments, which include at least one V region gene segment, one or more J gene segments, one or more D gene segments in the case of a heavy chain locus, and one or more constant region genes. In the present invention, at least one of the V gene segments encodes a germline or hypermutated human V-region amino acid sequence. Accordingly, such transgenic animals have the capacity to produce a diversified repertoire of immunoglobulin molecules, which include antibodies having a human idiotype.

[0071] In one embodiment, the artificial loci used comprise at least one non-human C region gene segment. Accordingly, such transgenic animals have the capacity to produce a diversified repertoire of immunoglobulin molecules, which include chimeric antibodies having a human idiotype.

[0072] In one embodiment, the artificial loci used comprise at least one human C region gene segment. Accordingly, such transgenic animals have the capacity to produce a diversified repertoire of immunoglobulin molecules, which include antibodies having a human idiotype and a human constant region.

[0073] In one embodiment, the artificial loci used comprise at least one artificial constant region gene. For example, an exemplary artificial C constant region gene is a constant region gene encoding a human IgG CH1 domain and rat IgG CH2 and CH3 domain. Accordingly, such transgenic animals have the capacity to produce a diversified repertoire of immunoglobulin molecules, which include antibodies having a human idiotype and an artificial constant region comprising both human and non-human components.

[0074] The transgenic vector containing an artificial Ig locus is introduced into the recipient cell or cells and then integrated into the genome of the recipient cell or cells by random integration or by targeted integration.

[0075] For random integration, a transgenic vector containing an artificial Ig locus can be introduced into a recipient cell by standard transgenic technology. For example, a transgenic vector can be directly injected into the pronucleus of a fertilized oocyte. A transgenic vector can also be introduced by co-incubation of sperm with the transgenic vector before fertilization of the oocyte. Transgenic animals can be developed from fertilized oocytes. Another way to introduce a transgenic vector is by transfecting embryonic stem cells or other pluripotent cells (for example primordial germ cells) and subsequently injecting the genetically modified cells into developing embryos. Alternatively, a transgenic vector (naked or in combination with facilitating reagents) can be directly injected into a developing embryo. Ultimately, chimeric transgenic animals are produced from the embryos which contain the artificial Ig transgene integrated in the genome of at least some somatic cells of the transgenic animal. In another embodiment, the transgenic vector is introduced into the genome of a cell and an animal is derived from the transfected cell by nuclear transfer cloning.

[0076] In a preferred embodiment, a transgene containing an artificial Ig locus is randomly integrated into the genome of recipient cells (such as fertilized oocyte or developing embryos). In a preferred embodiment, offspring that are nullizygous for endogenous Ig heavy chain and/or Ig light chain and, accordingly, incapable of producing endogenous immunoglobulins and capable of producing transgenic immunoglobulins are obtained.

[0077] For targeted integration, a transgenic vector can be introduced into appropriate recipient cells such as embryonic stem cells, other pluripotent cells or already differentiated somatic cells. Afterwards, cells in which the transgene has integrated into the animal genome can be selected by standard methods. The selected cells may then be fused with enucleated nuclear transfer unit cells, e.g. oocytes or embryonic stem cells, cells which are totipotent and capable of forming a functional neonate. Fusion is performed in accordance with conventional techniques which are well established. See, for example, Cibelli et al., Science (1998) 280:1256; Zhou et al. Science (2003) 301:1179. Enucleation of oocytes and nuclear transfer can also be performed by microsurgery using injection pipettes. (See, for example, Wakayama et al., Nature (1998) 394:369.) The resulting cells are then cultivated in an appropriate medium, and transferred into synchronized recipients for generating transgenic animals. Alternatively, the selected genetically modified cells can be injected into developing embryos which are subsequently developed into chimeric animals.

[0078] In one embodiment, a meganuclease is used to increase the frequency of homologous recombination at a target site through double-strand DNA cleavage. For integration into a specific site, a site specific meganuclease may be used. In one embodiment, a meganuclease targeting an endogenous Ig locus is used to increase the frequency of homologous recombination and replacement of an endogenous Ig locus, or parts thereof with an artificial Ig locus, or parts thereof. In one embodiment, the transgenic animal lacks a functional Ig light chain locus and comprises an artificial Ig heavy chain locus.

[0079] The preferred embodiments for integration of the human Ig gene segments using YACs and BACs, and interchanging between the two, has the advantage of both, speed and the ability to check integrity when making constructs of large regions by overlapping homology. The tandem integration of the constructs with overlapping regions have the ability to integrate, such as to maintain the full functionality, which is essential for DNA rearrangement. The preferred embodiments of the invention not only have the desired integration by homology but also produce tandem integration as a frequent event. This cases the transgenic technology substantially as no laborious integration of large YACs into stem cells and subsequent animal derivation therefrom has to be performed. In addition, ZFN technology, also performed via DNA injection (Geurts et al. Science 325, 433 (2009); Menoret et al. European journal of immunology 40, 2932-2941 (2010)), produced Ig KO strains easily and may well be the future technology of choice for gene disruptions and replacement. Silenced endogenous Ig gene expression in OmniRats™, containing human-rat IgH and human IgL loci, has the advantage that no interfering or undesired rat Ig could give rise to mixed products.

[0080] In the mouse an enhancer region downstream of Cα plays a vital role in class-switch recombination (Vincent-Fabert et al. Blood 116, 1895-1898 (2010)) and it is likely that elements in that region may facilitate hypermutation (Pruzina et al. Protein engineering, design & selection: PEDS 24, 791-799 (2011)). This may be the reason why immune responses and generation of diverse hybridomas at high frequency may be difficult in mice carrying even a large fully human locus (Davis et al. Cancer metastasis reviews 18, 421-425 (1999); Lonberg Current opinion in immunology 20, 450-459 (2008)). As the chimeric human-rat IgH locus facilitates near wt differentiation and expression levels in OmniRats, it can be concluded that the endogenous rat C region and indeed the ˜30 kb enhancer sequence 3′ of Ca are providing optimal locus control to express and mature human V_{H} genes. Another region, Cδ with its 3′ control motif cluster (Mundt et al. J Immunol 166, 3315-3323 (2001)), has been removed from the chimeric C-region BAC since silencing or a lack of IgD did not appear to reduce immune function (Chen Immunol Rev 237, 160-179 (2010)). Normally, mature IgM⁺IgD⁺ B-cells down-regulate IgD upon antigen contact, which initiates class-switch recombination (Id). Thus, switching may be increased without IgD control, which is supported by our finding that IgG transcripts and serum levels are significantly lower when the C8 region is retained in transgenic constructs (data not shown).

[0081] The production of specific IgG in OmniRats™ is particularly encouraging as we found that in various immunizations mAbs with diversity in sequence and epitope, comparable to what was produced in wt controls, could be isolated via spleen and lymph node fusion. V-gene, D and J diversity was as expected and nearly all segments were found to be used productively as predicted (Lefranc & Lefranc The immunoglobulin factsbook. FactsBook Series, Academic Press, GB, 45-68 (2001)). This was in stark contrast to mice carrying fully human transloci where clonal expansion from a few precursor B-cells produced little diversity (Pruzina et al. Protein engineering, design & selection: PEDS 24, 791-799 (2011)). Since the number of transplanted V-genes is only about half of what is used in humans we anticipated to find restricted immune responses and limited diversity when comparing OmniRats with wt animals. However, this was not the case and a comparison of CDR3 diversity in over 1000 clones (sequences can be provided) revealed the same extensive junctional differences in OmniRats as in wt animals. The few identical gene-segment combinations were further diversified by N-sequence additions or deletion at the V_{H} to D and/or D to J_{H} junctions and also by hypermutation. Thus, it is clear that the rat C region sequence is highly efficient in controlling DNA rearrangement and expression of human V_{H}DJ_{H}. Extensive diversity was also seen for the introduced human Igκ and Igλ loci, similar to what has previously been shown in mice (Nicholson et al. J Immunol 163, 6898-6906 (1999); Pruzina et al. Protein engineering, design & selection: PEDS 24, 791-799 (2011); Popov et al. The Journal of experimental medicine 189, 1611-1620 (1999)). Hence, substantially reduced efficiency in the production of human antibodies from mice (Lonberg, N. Nature biotechnology 23, 1117-1125 (2005)) has been overcome in OmniRats™, which diversify rearranged H-chains reliably and extensively by class-switch and hypermutation to yield high affinity antibodies in bulk rather than occasionally. The yield of transgenic IgG and the level of hypermutation, impressively utilized in antigen-specific mAbs, showed that clonal diversification and production level are similar between OmniRats™ and wt animals. Routine generation of high affinity specificities in the subnanomolar range was even accomplished by different single immunizations and again compares favorably with wt animals; results that have not been shown in transgenic mice producing human antibody repertoires from entirely human loci (Mendez et al. Nature genetics 15, 146-156 (1997)).

[0082] In summary, to maximize human antibody production an IgH locus that uses human genes for antibody specificity but rodent genes for control of differentiation and high expression should be regarded essential. L-chain flexibility is a bonus as it permits highly efficient human IgH/IgL assembly even when wt Ig is present. For therapeutic applications chimeric H-chains can be easily converted into fully human Abs by C-gene replacement without compromising the specificity.

### Immunoglobulins Having a Human Idiotype

[0083] Once a transgenic animal capable of producing immunoglobulins having a human idiotype is made, immunoglobulins and antibody preparations against an antigen can be readily obtained by immunizing the animal with the antigen. “Polyclonal antisera composition” as used herein includes affinity purified polyclonal antibody preparations.

[0084] A variety of antigens can be used to immunize a transgenic animal. Such antigens include but are not limited to, microorganisms, e.g. viruses and unicellular organisms (such as bacteria and fungi), alive, attenuated or dead, fragments of the microorganisms, or antigenic molecules isolated from the microorganisms.

[0085] Preferred bacterial antigens for use in immunizing an animal include purified antigens from Staphylococcus aureus such as capsular polysaccharides type 5 and 8, recombinant versions of virulence factors such as alpha-toxin, adhesin binding proteins, collagen binding proteins, and fibronectin binding proteins. Preferred bacterial antigens also include an attenuated version of S. aureus, Pseudomonas aeruginosa, enterococcus, enterobacter, and Klebsiella pneumoniae, or culture supernatant from these bacteria cells. Other bacterial antigens which can be used in immunization include purified lipopolysaccharide (LPS), capsular antigens, capsular polysaccharides and/or recombinant versions of the outer membrane proteins, fibronectin binding proteins, endotoxin, and exotoxin from Pseudomonas aeruginosa, enterococcus, enterobacter, and Klebsiella pneumoniae.

[0086] Preferred antigens for the generation of antibodies against fungi include attenuated version of fungi or outer membrane proteins thereof, which fungi include, but are not limited to, Candida albicans, Candida parapsilosis, Candida tropicalis, and Cryptococcus neoformans.

[0087] Preferred antigens for use in immunization in order to generate antibodies against viruses include the envelop proteins and attenuated versions of viruses which include, but are not limited to respiratory synctial virus (RSV) (particularly the F-Protein), Hepatitis C virus (HCV), Hepatitis B virus (HBV), cytomegalovirus (CMV), EBV, and HSV.

[0088] Antibodies specific for cancer can be generated by immunizing transgenic animals with isolated tumor cells or tumor cell lines as well as tumor-associated antigens which include, but are not limited to, Her-2-neu antigen (antibodies against which are useful for the treatment of breast cancer); CD20, CD22 and CD53 antigens (antibodies against which are useful for the treatment of B cell lymphomas), prostate specific membrane antigen (PMSA) (antibodies against which are useful for the treatment of prostate cancer), and 17-1A molecule (antibodies against which are useful for the treatment of colon cancer).

[0089] The antigens can be administered to a transgenic animal in any convenient manner, with or without an adjuvant, and can be administered in accordance with a predetermined schedule.

[0090] For making a monoclonal antibody, spleen cells are isolated from the immunized transgenic animal and used either in cell fusion with transformed cell lines for the production of hybridomas, or cDNAs encoding antibodies are cloned by standard molecular biology techniques and expressed in transfected cells. The procedures for making monoclonal antibodies are well established in the art. See, e.g., European Patent Application 0 583 980 A1 (“Method For Generating Monoclonal Antibodies From Rabbits”), U.S. Pat. No. 4,977,081 (“Stable Rabbit-Mouse Hybridomas And Secretion Products Thereof”), WO 97/16537 (“Stable Chicken B-cell Line And Method of Use Thereof”), and EP 0 491 057 B1 (“Hybridoma Which Produces Avian Specific Immunoglobulin G”), the disclosures of which are incorporated herein by reference. In vitro production of monoclonal antibodies from cloned cDNA molecules has been described by Andris-Widhopf et al. J Immunol Methods 242:159 (2000), and by Burton Immunotechnology 1:87 (1995).

[0091] Once chimeric monoclonal antibodies with human idiotypes have been generated, such chimeric antibodies can be easily converted into fully human antibodies using standard molecular biology techniques. Fully human monoclonal antibodies are not immunogenic in humans and are appropriate for use in the therapeutic treatment of human subjects.

### Antibodies of the Invention Include Heavy Chain-Only Antibodies

[0092] In one embodiment, transgenic animals which lack a functional Ig light chain locus, and comprising at least two artificial heavy chain loci, are immunized with antigen to produce heavy chain-only antibodies that specifically bind to antigen.

[0093] In one embodiment, the invention provides monoclonal antibody producing cells derived from such animals, as well as nucleic acids derived therefrom. Also provided are hybridomas derived therefrom. Also provided are fully human heavy chain-only antibodies, as well as encoding nucleic acids, derived therefrom.

[0094] Teachings on heavy chain-only antibodies are found in the art. For example, see PCT publications WO02085944, WO02085945, WO2006008548, and WO2007096779. See also U.S. Pat. Nos. 5,840,526; 5,874,541; 6,005,079; 6,765,087; 5,800,988; EP 1589107; WO 9734103; and U.S. Pat. No. 6,015,695.

### Pharmaceutical Compositions

[0095] In a further embodiment of the present invention, purified monoclonal or polyclonal antibodies are admixed with an appropriate pharmaceutical carrier suitable for administration to patients, to provide pharmaceutical compositions.

[0096] Patients treated with the pharmaceutical compositions of the invention are preferably mammals, more preferably humans, though veterinary uses are also contemplated.

[0097] Pharmaceutically acceptable carriers which can be employed in the present pharmaceutical compositions can be any and all solvents, dispersion media, isotonic agents and the like. Except insofar as any conventional media, agent, diluent or carrier is detrimental to the recipient or to the therapeutic effectiveness of the antibodies contained therein, its use in the pharmaceutical compositions of the present invention is appropriate.

[0098] The carrier can be liquid, semi-solid, e.g. pastes, or solid carriers. Examples of carriers include oils, water, saline solutions, alcohol, sugar, gel, lipids, liposomes, resins, porous matrices, binders, fillers, coatings, preservatives and the like, or combinations thereof.

### Methods of Treatment

[0099] In a further aspect of the present invention, methods are provided for treating a disease in a vertebrate, preferably a mammal, preferably a primate, with human subjects being an especially preferred embodiment, by administering a purified antibody composition of the invention desirable for treating such disease.

[0100] The antibody compositions can be used to bind and neutralize or modulate an antigenic entity in human body tissues that causes or contributes to disease or that elicits undesired or abnormal immune responses. An “antigenic entity” is herein defined to encompass any soluble or cell surface bound molecules including proteins, as well as cells or infectious disease-causing organisms or agents that are at least capable of binding to an antibody and preferably are also capable of stimulating an immune response.

[0101] Administration of an antibody composition against an infectious agent as a monotherapy or in combination with chemotherapy results in elimination of infectious particles. A single administration of antibodies decreases the number of infectious particles generally 10 to 100 fold, more commonly more than 1000-fold. Similarly, antibody therapy in patients with a malignant disease employed as a monotherapy or in combination with chemotherapy reduces the number of malignant cells generally 10 to 100 fold, or more than 1000-fold. Therapy may be repeated over an extended amount of time to assure the complete elimination of infectious particles, malignant cells, etc. In some instances, therapy with antibody preparations will be continued for extended periods of time in the absence of detectable amounts of infectious particles or undesirable cells.

[0102] Similarly, the use of antibody therapy for the modulation of immune responses may consist of single or multiple administrations of therapeutic antibodies. Therapy may be continued for extended periods of time in the absence of any disease symptoms.

[0103] The subject treatment may be employed in conjunction with chemotherapy at dosages sufficient to inhibit infectious disease or malignancies. In autoimmune disease patients or transplant recipients, antibody therapy may be employed in conjunction with immunosuppressive therapy at dosages sufficient to inhibit immune reactions.

### Examples

[0104] In mice transgenic for human immunoglobulin (Ig) loci, suboptimal efficacy in delivery of fully human antibodies has been attributed to imperfect interaction between the constant regions of human membrane IgH chains and the mouse cellular signaling machinery. To obviate this problem, we here describe a humanized rat strain (OmniRat™) carrying chimeric human/rat IgH loci [comprising 22 human V_{H}s, all human D and J_{H} segments with germline gene spacing but linked to the rat C_{H} locus] together with fully human light-chain loci [12 Vκs linked to Jκ-Cκ and 16 Vas linked to Jλ-Cλ]. The endogenous rat Ig loci were silenced by designer zinc finger nucleases. Following immunization, OmniRats perform as efficiently as normal rats in yielding high affinity serum IgG. Monoclonal antibodies, comprising fully human variable regions with sub-nanomolar antigen affinity and carrying extensive somatic mutations, are readily obtainable-similarly to the yield of conventional antibodies from normal rats.

### Materials and Methods

### Construction of Modified Human Ig Loci on YACs and BACs

a) IgH loci

[0105] The human IgH V genes were covered by 2 BACs: BAC6-VH3-11 containing the authentic region spanning from VH4-39 to VH3-23 followed by VH3-11 (modified from a commercially available BAC clone 3054M17 CITB) and BAC3 containing the authentic region spanning from VH3-11 to VH6-1 (811L16 RPCI-11). A BAC termed Annabel was constructed by joining rat CH region genes immediately downstream of the human VH6-1-Ds-JHs region (FIG. 1A and FIG. 1B). All BAC clones containing part of the human or rat IgH locus were purchased from Invitrogen.

[0106] Both BAC6-VH3-11 and Annabel were initially constructed in S. cerevisiae as circular YACs (cYACs) and further checked and maintained in E. coli as BACs.

[0107] Unlike YACs, BAC plasmid preps yield large quantities of the desired DNA. To convert a linear YAC into a cYAC or to assemble DNA fragments with overlapping ends into a single cYAC in S. cerevisiae, which can also be maintained as a BAC in E. coli, two self-replicating S. cerevisiae/E. coli shuttle vectors, pBelo-CEN-URA, and pBelo-CEN-HYG were constructed. Briefly, S. cerevisiae CEN4 was cut out as an AvrII fragment from pYAC-RC (Marchuk & Collins Nucleic acids research 16, 7743 (1988)) and ligated to Spel-linearised pAP599 (Kaur & Cormack PNAS 104, 7628-7633 (2007)). The resulting plasmid contains CEN4 cloned in between S. cerevisiae URA3 and a hygromycin-resistance expression cassette (HygR). From this plasmid, an ApaLI-BamHI fragment containing URA3 followed by CEN4 or a PmlI-SphI fragment containing CEN4 followed by HygR was cut out, and ligated to ApaLI and BamHI or HpaI and SphI doubly digested pBACBelo11 (New England Biolabs) to yield pBelo-CEN-URA and pBelo-CEN-HYG.

[0108] To construct BAC6-VH3-11, initially two fragments, a 115 kb NotI-Pmel and a 110 kb RsrII-SgrAI, were cut out from the BAC clone 3054M17 CITB. The 3′ end of the former fragment overlaps 22 kb with the 5′ end of the latter. The NotI-Pmel fragment was ligated to a NotI-BamHI YAC arm containing S. cerevisiae CEN4 as well as TRP1/ARS1 from pYAC-RC, and the RsrII-SgrAI fragment was ligated to a SgrAI-BamHI YAC arm containing S. cerevisiae URA3, also from pYAC-RC. Subsequently, the ligation mixture was transformed into S. cerevisiae AB1380 cells via spheroplast transformation⁴¹, and URA+TRP+ yeast clones were selected. Clones, termed YAC6, containing the linear region from human VH4-39 to VH3-23 were confirmed by Southern blot analysis. YAC6 was further extended by addition of a 10.6 kb fragment 3′ of VH3-23, and conversion to a cYAC. The 10.6 kb extension contains the human VH3-11 and also occurs at the 5′ end of BAC3. We constructed pBeloHYG-YAC6+BAC3 (5′) for the modification of YAC6. Briefly, 3 fragments with overlapping ends were prepared by PCR: 1) a ‘stuff” fragment containing S. cerevisiae TRP1-ARS1 flanked by HpaI sites with 5’ tail matching the sequence upstream of VH4-39 and 3′ tail matching downstream of VH3-23 in YAC6 (using long oligoes 561 and 562, and pYAC-RC as template), 2) the 10.6 kb extension fragment with a 5′ tail matching the sequence downstream of V_{H}3-23 as described above and a unique AscI site at its 3′ end (using long oligoes 570 and 412, and human genomic DNA as template), and 3) pBelo-CEN-HYG vector with the CEN4 joined downstream with a homology tail matching the 3′ end of the 10.6 extension fragment and the HygR joined upstream with a tail matching the sequence upstream of VH4-39 as described above (using long oligoes 414 and 566, and pBelo-CEN-HYG as template). Subsequently, the 3 PCR fragments were assembled into a small cYAC conferring HYGR and TRP+ in S. cerevisiae via homologous recombination associated with spheroplast transformation, and this cYAC was further converted into the BAC pBeloHYG-YAC6+BAC3 (5′). Finally, the HpaI-digested pBeloHYG-YAC6+BAC3 (5′) was used to transform yeast cells carrying YAC6, and through homologous recombination cYAC BAC6-VH3-11 conferring only HYGR was generated. Via transformation, see below, this cYAC was introduced as a BAC in E. coli. The human VH genes in BAC6-VH3-11 were cut out as a ˜ 182 kb AsiSI (occurring naturally in the HygR)—AscI fragment, and the VH genes in BAC3 were cut out as a ˜173 kb NotI-fragment (FIG. 1A top).

[0109] A self-replicating shuttle vector, termed pCAU, efficiently working in both Saccharomyces cerevisiae and E. coli, was constructed based on pBelo-CEN-URA published previously. (Osborn et al. J Immunol 2013; 190:1481-1490) In brief, ARSH4 was amplified from S. cerevisiae genomic DNA using primers 878 and 879 (all primer sequences are listed below), with an ApaLI site followed by AsiSI and a SexAI introduced into either end. The fragment was digested with ApaLI and SexAI, and ligated with pBelo-CEN-URA digested with the same restriction enzymes to yield pCAU. This vector contains S. cerevisiae CEN4, URA3 and ARSH4 in the pBeloBAC11 backbone (New England BioLabs).

[0110] Three BACs derived from human chromosome 14-CTD-2011A5 (BAC9), CTD-3148C6 (BAC14), CTD-2548B8 (BAC5) were purchased from Invitrogen/Thermo Fisher. The human genomic region encompassing IgHV3-74 to IgHV1-58 in BAC9 was isolated as a 185 kb NotI-fragment. BAC (14+5) was constructed from BAC14 and BAC5. The combined genomic regions in this BAC was isolated as a 210 kb BsiwI-fragment including from 5′ to 3′: a 90.6 kb region derived from BAC14 containing 4.6 kb sequence overlapping with the 3′ of the NotI-fragment from BAC9 followed by a 86 kb region encompassing IgHV5-51 to IgHV1-45, a 1.7 kb synthetic region joining BAC14 and BAC5 with IgHV3-43 located in the centre, a 111.7 kb region derived from BAC5 encompassing IgHV3-21 to IgHV3-13, and a 6.1 kb region providing an overlap with the 5′ of Anabel (the BAC carrying human Ig constant regions).

[0111] BAC (14+5, also referenced as 14/5) was constructed in three steps all involving generating a circular YAC (cYAC) via homologous recombination in yeast and converting the cYAC to BAC as described previously. Firstly, a BAC vector-pCAU+GAP-BAC14,5, was generated by assembling the following 3 overlapping fragments in yeast: a 1.9 kb synthetic DNA (ordered from ThermoFisher) containing from 5′ to 3′: 116 bp sequence overlapping with the 5′ as well as 3′ end of the desired region in BAC14 with an unique RsrII site in the centre, 1.6 kb IgHV3-43 gene [including 1.0 kb 5′ untranslated region (UTR) and 0.2 kb 3′ UTR], 106 bp sequence overlapping with the 5′ as well as 3′ end of the desired region in BAC5 with an unique Pmel site in the centre, and 38 bp sequence overlapping with the 5′ end of Anabel, a 6.1 kb PCR fragment corresponding to the 5′ of Anabel using primers 383 and 384, and an amplified pCAU vector using primers 1066 and 1088. Secondly, the pCAU+GAP-BAC14,5 vector was linearized with Pmel, and co-transformed with a 154 kb NotI-fragment isolated from BAC5 into yeast strain AB1380. The resulting BAC (˜ 128 kb in length) had the desired region of BAC5 incorporated into the BAC vector via homologous recombination mediated by the homology ends to BAC5 exposed in the Pmel-linearized vector. Thirdly, the BAC carrying BAC5 from the second step was linearized with RsrII to expose the homology ends to the desired region in BAC14, and co-transformed with a 114 kb SnaBI-fragment isolated from BAC14 to yield BAC (14+5).

[0112] For the assembly of the C region with the VH overlap, the human VH6-1-Ds-JHs region had to be joined with the rat genomic sequence immediately downstream of the last JH followed by rat Cs to yield a cYAC/BAC. To achieve this, 5 overlapping restriction as well as PCR fragments were prepared; a 6.1 kb fragment 5′ of human VH6-1 (using oligos 383 and 384, and human genomic DNA as template), an ˜78 kb PvuI-PacI fragment containing the human VH6-1-Ds-JHs region cut out from BAC1 (RP11645E6), a 8.7 kb fragment joining the human JH6 with the rat genomic sequence immediately downstream of the last JH and containing part of rat μ coding sequence (using oligos 488 and 346, and rat genomic DNA as template), an ˜ 52 kb NotI-Pmel fragment containing the authentic rat μ, δ and γ2c region cut out from BAC M5 (CH230-408M5) and the pBelo-CEN-URA vector with the URA3 joined downstream with a homology tail matching the 3′ end of the rat γ2c region and the CEN4 joined upstream with a tail matching the 5′ region of human VH6-1 as described (using long oligoes 385 and 550, and pBelo-CEN-URA as template). Correct assembly via homologous recombination in S. cerevisiae was analyzed by PCR and purified cYAC from the correct clones was converted into a BAC in E. coli.

[0113] For the assembly of Annabel parts of the above cYAC/BAC containing human VH6-1-Ds-JHs followed by the authentic rat μ, 8 and γ2c region, as well as PCR fragments were used. Five overlapping fragments contained the 6.1 kb fragment at the 5′ end of human VH6-1 as described above, an ˜83 kb Spel fragment comprising human VH6-1-Ds-JHs immediately followed by the rat genomic sequence downstream of the last JH and containing part of rat Cu, a 5.2 kb fragment joining the 3′ end of rat μ with the 5′ end of rat γ1 (using oligos 490 and 534, and rat genomic DNA as template), an ˜118 kb NotI-SgrAI fragment containing the authentic rat γ1, γ2b, ε, α and 3′E IgH enhancer region cut out from BAC 18 (CH230-162108), and the pBelo-CEN-URA vector with the URA3 joined downstream with a homology tail matching the 3′ end of rat 3′E and the CEN4 joined upstream with a tail matching the 5′ end of human VH6-1 as described above. There is a 10.3 kb overlap between the human VH6-1 regions in both the BAC3 and Annabel. The human VH6-1-Ds-JHs followed by the rat CH region together with the S. cerevisiae URA3 in Annabel can be cut out as a single ˜183 kb NotI-fragment (see FIG. 1A and FIG. 1B).

[0114] BAC6-VH3-11, BAC3, BAC9 and BAC (14+5) and Annabel were checked extensively by restriction analysis and partial sequencing for their authenticity.

b) IgL loci

[0115] The human Igλ locus on a ˜410 kb YAC was obtained by recombination assembly of a Vλ YAC with 3 Cλ containing cosmids (Popov et al. Gene 177, 195-201 (1996)). Rearrangement and expression was verified in transgenic mice derived from ES cells containing one copy of a complete human Igλ YAC (Popov et al. The Journal of experimental medicine 189, 1611-1620 (1999)). This Igλ YAC was shortened by the generation of a circular YAC removing ˜100 kb of the region 5′ of Vλ3-27. The vector pYAC-RC was digested with ClaI and BspEI to remove URA3 and ligated with a ClaI/NgoMIV fragment from pAP 599 containing HYG. PCR of the region containing the yeast centromere and hygromycin marker gene from the new vector (pYAC-RC-HYG) was carried out with primers with 5′ ends homologous to a region 5′ of Vλ3-27 (primer 276) and within the ADE2 marker gene in the YAC arm (primer 275). The PCR fragment (3.8 kb) was integrated into the Igλ YAC using a high efficiency lithium acetate transformation method (Gietz & Woods Methods in Microbiology 26, 53-66 (1998)) and selection on hygromycin containing YPD plates. DNA was prepared from the clones (Epicentre MasterPure Yeast DNA purification kit) and analysed for the correct junctions by PCR using the following oligos: 243+278 and Hyg end R+238. Plugs were made (Peterson Nature protocols 2, 3009-3015 (2007)) and yeast chromosomes removed by PFGE (0.8% agarose (PFC) (Biorad) gel [6V/cm, pulse times of 60 s for 10 hr and 10 s for 10 hr, 8° C.) leaving the circular yeast artificial chromosome caught in the agarose block (Beverly, Nucleic acids research 16, 925-939 (1988)). The blocks were removed and digested with NruI. Briefly, blocks were preincubated with restriction enzyme buffer in excess at a 1× final concentration for 1 hr on ice. Excess buffer was removed leaving just enough to cover the plugs, restriction enzyme was added to a final concentration of 100 U/ml and the tube incubated at 37° C. for 4-5 hrs. The linearized YAC was ran out of the blocks by PFGE, cut out from the gel as a strip and purified as described below.

[0116] For the human Igκ locus 3 BACs were chosen (RP11-344F17, RP11-1134E24 and RP11-156D9, Invitrogen), which covered a region over 300 kb from 5′ Vκ1-17 to 3′ KDE (Kawasaki et al. European journal of immunology 31, 1017-1028 (2001)). In digests and sequence analyses three overlapping fragments were identified: from Vκ1-17 to Vκ3-7 (150 kb NotI with ˜14 kb overlap), from Vκ3-7 to 3′ of CK (158 kb NotI with ˜40 kb overlap) and from CK to 3′ of the KDE (55 kb PacI with 40 kb overlap). Overlapping regions may generally favour joint integration when co-injected into oocytes (Wagner et al. Genomics 35, 405-414 (1996)).

### Gel Analyses and DNA Purification

[0117] Purified YAC and BAC DNA was analysed by restriction digest and separation on conventional 0.7% agarose gels (Sambrook & Russell Molecular Cloning. A laboratory Manual. Cold Spring Harbor Laboratory Press, NY (2001)). Larger fragments, 50-200 kb, were separated by PFGE (Biorad Chef Mapper™) at 80 C, using 0.8% PFC Agaraose in 0.5% TBE, at 2-20 sec switch time for 16 h, 6V/cm, 10 mA. Purification allowed a direct comparison of the resulting fragments with the predicted size obtained from the sequence analysis. Alterations were analysed by PCR and sequencing.

[0118] Linear YACs, circular YACs and BAC fragments after digests, were purified by electro-elution using Elutrap™ (Schleicher and Schuell) (Gu et al. Journal of biochemical and biophysical methods 24, 45-50 (1992)) from strips cut from 0.8% agarose gels run conventionally or from pulsed-field-gel electrophoresis (PFGE). The DNA concentration was usually several ng/μl in a volume of ˜100 μl. For fragments up to ˜200 kb the DNA was precipitated and re-dissolved in micro-injection buffer (10 mM Tris-HCl pH 7.5, 100 mM EDTA pH 8 and 100 mM NaCl but without Spermine/Spermidine) to the desired concentration.

[0119] The purification of circular YACs from yeast was carried out using Nucleobond AX silica-based anion-exchange resin (Macherey-Nagel, Germany). Briefly, spheroplasts were made using zymolyase or lyticase and pelleted (Davies et al. Human antibody repertoires in transgenic mice: Manipulation and transfer of YACs. IRL Oxford, 59-76 (1996)). The cells then underwent alkaline lysis, binding to AX100 column and elution as described in the Nucleobond method for a low-copy plasmid. Contaminating yeast chromosomal DNA was hydolyzed using Plamid-Safe™ ATP-Dependent DNase (Epicentre Biotechnologies) followed by a final cleanup step using SureClean (Bioline). An aliquot of DH10 electrocompetent cells (Invitrogen) was then transformed with the circular YAC to obtain BAC colonies. For microinjection, the insert DNA (150-200 kb), was separated from BAC vector DNA (˜10 kb) using a filtration step with sepharose 4B-CL (Yang et al. Nature biotechnology 15, 859-865 (1997)).

### Derivation of Rats and Breeding

[0120] Purified DNA encoding recombinant immunoglobulin loci was resuspended in microinjection buffer with 10 mM Spermine and 10 mM Spermidine. The DNA was injected into fertilized oocytes at various concentrations from 0.5 to 3 ng/μl.

[0121] Plasmid DNA or mRNA encoding ZFNs specific for rat immunoglobulin genes were injected into fertilized oocytes at various concentrations from 0.5 to 10 ng/μl.

[0122] Microinjections were performed at Caliper Life Sciences facility. Outbred SD/Hsd (WT) strain animals were housed in standard microisolator cages under approved animal care protocols in animal facility that is accredited by the Association for the Assessment and Accreditation for Laboratory Animal Care (AAALAC). The rats were maintained on a 14-10 h light/dark cycle with ad libitum access to food and water. Four to five week old SD/Hsd female rats were injected with 20-25 IU PMSG (Sigma-Aldrich) followed 48 hours later with 20-25 IU hCG (Sigma-Aldrich) before breeding to outbred SD/Hsd males. Fertilized 1-cell stage embryos were collected for subsequent microinjection. Manipulated embryos were transferred to pseudopregnant SD/Hsd female rats to be carried to parturition.

[0123] Multi-feature human Ig rats (human IgH, Igκ and Igλ in combination with rat J KO, κ KO and λ KO) and WT, as control, were analyzed at 10-18 weeks of age. The animals were bred at Charles River under specific pathogen-free conditions.

[0124] The procedure of introducing multiple different V_{H} region on separate loci can be implemented through the insertion of these different loci into separate transgenic rats (preferably with a defective rat IgH locus) as described in the example above. These separate loci are used to generate separate transgenic rat lines, which are subsequently crossed to obtain double transgenic rats that would have all of the VHregions used available for the recombination process. Crossing these rats to homozygosity for both loci would double the number of VH regions available for recombination (see FIG. 3 karyogram with one locus integrated on chromosome 6 and one locus on chromosome 15). Having multiple copies of an integrated locus would increase this number yet further.

[0125] The procedure of introducing distinct loci separately, by the transfer of multiple different V_{H} regions in conjunction with one constant region array, allowed unconnected and multiple translocus integration. This was followed by breeding to generate an animal that expresses antibodies from both separately integrated loci.

[0126] The same procedure is also applied for the light chains, where one line of animals is made with a kappa locus and another line is made with a lambda locus. The loci are combined in animals by crossbreeding.

### PCR and RT-PCR

[0127] Transgenic rats were identified by PCR from tail or ear clip DNA using a Genomic DNA Mini Kid (Bioline). For IgH PCRs <1 kb GoTaq Green Master mix was used (Promega) under the following conditions: 94° C. 2 mins, 32×(94° C. 30 secs, 54-67° C. (see Table 1 for primers and specific annealing temperatures) 30 secs, 72° C. 1 min), 72° C. 2 mins. For IgH PCRs >1 kb KOD polymerase (Novagen) was used under the following conditions: 95° C. 2 mins, 32×(95° C. 20 secs, 56-62° C., Table 1) 20 secs, 70° C. 90 secs), 70° C. 2 mins. For Igκ and Igλ PCR, all <1 kb, the above condition were used except extension at 72° C. for 50 secs.

[0128] RNA was extracted from Blood using the RiboPure Blood Kit (Ambion) and RNA extraction from spleen, bone marrow or lymph nodes used RNASpin mini kit. (GE Healthcare). cDNA was made using Oligo dT and Promega Reverse Transcriptase at 42° C. for 1 hour. GAPDH PCR reactions (oligos 429-430) determined the concentration.

[0129] RT-PCRs were set up using VH leader primers with rat μCH2 or rat γCH2 primers (Table 2). Amplification with GoTaq Green Master mix were 94° C. 2 mins, 34×(94° C. 30 secs, 55-65° C. 30 secs, 72° C. 50-60 secs), 72° C. 2 mins. PCR products of the expected size were either purified by gel or QuickClean (Bioline) and sequenced directly or cloned into pGemT (Promega).

[0130] The sequences of the primers used in the PCR and RT-PCR assays to detect human IgH and IgL integration and expression are provided in Table 3.

### Characterization of Antibodies in Immunized OmniRat Animals by Next Generation Sequencing

[0131] A total of 6 OmniRat2 animals were immunized with beta-gal and B-cells were isolated from draining lymph nodes. After pelleting the B-cells and removing supernatant, total RNA was prepared from lymph node derived B-cells. RNA was reverse transcribed, and the resulting cDNA was used as template to amplify the full variable region of the Ig heavy chain rearranged locus (the VH region). This amplified product was then prepared for next-generation sequencing (NGS) and the full VH repertoire of each animal was determined by NGS.

[0132] After post-processing and quality control of the raw NGS reads, the V-gene usage of each animal was determined by aligning each unique VH sequence to the germline V-gene reference sequence. The percent V-gene usage was calculated as the number of VH sequences using a particular V-gene divided by the total number of VH sequences in that animal.

### Protein Purification

[0133] IgM was purified on anti-IgM affinity matrix (BAC B.V., Netherlands, CaptureSelect #2890.05) as described in the protocol. Similarly, human Igκ and Igλ was purified on anti-L chain affinity matrix (CaptureSelect anti-Igκ #0833 and anti-Igλ 0849) according to the protocol.

[0134] For rat IgG purification (Bruggemann et al. J Immunol 142, 3145-3150 (1989)) protein A and protein G agarose was used (Innova, Cambridge, UK, #851-0024 and #895-0024). Serum was incubated with the resin and binding facilitated at 0.1 M sodium phosphate pH 7 for protein G and pH 8 for protein A under gentle mixing. Poly-prep columns (Bio-Rad) were packed with the mixture and washed extensively with PBS pH7.4. Elution buffer was 0.1 M Sodium Citrate pH 2.5 and neutralization buffer was 1 M Tris-HCl pH 9.

[0135] Electrophoresis was performed on 4-15% SDS-PAGE and Coomassie brilliant blue was used for staining. MW standards were HyperPage Prestained Protein Marker (#BIO-33066, Bioline).

### Flow Cytometry Analysis and FISH

[0136] Cell suspensions were washed and adjusted to 5×105 cells/100 μl in PBS-1% BSA-0.1% Azide. Different B-cell subsets were identified using mouse anti-rat IgM FITC-labelled mAb (MARM 4, Jackson Immunoresearch Laboratories) in combination with anti-B cell CD45R (rat B220)-PE-conjugated mAb (His 24, BD biosciences) or anti-IgD-PE-conjugated mAb (MARD-3, Abd Serotec). A FACS CantoII flow cytometer and FlowJo software (Becton Dickinson, Pont de Claix, France) was used for the analysis.

[0137] Fluorescence in situ hybridisation was carried out on fixed blood lymphocytes using purified IgH and IgL C-region BACs as described. (Meisner & Johnson Methods 45, 133-141 (2008))

### Immunization, Cell Fusion and Affinity Measurement

[0138] Immunizations were performed with 125 μg PG in CFA, 150 μg hGHR in CFA, 200 μg Tau/KLH in CFA, 150 μg HEL in CFA, 150 μg OVA in CFA at the base of the tail and medial iliac lymph node cells were fused with mouse P3X63Ag8.653 myeloma cells 22 days later as described (Kishiro et al. Cell structure and function 20, 151-156 (1995)). For multiple immunizations protein, 125 μg PG or HEL, or 100 μg hGHR or CD14 in GERBU adjuvant (www.Gerbu.com), was administered intraperitoneally as follows: day 0, day 14, day 28 and day 41 without adjuvant, followed by spleen cell fusion with P3×63Ag8.653 cells 4 days later (Meisner & Johnson Methods 45, 133-141 (2008)).

[0139] Binding kinetics were analyzed by surface Plasmon resonance using a Biacore 2000 with the antigens directly immobilized as described (Pruzina et al. Protein engineering, design & selection: PEDS 24, 791-799 (2011)).

### Detection of Antigen-Specific Antibodies by ELISA

[0140] Rat serum samples were analysed for B-Gal IgG and IgM antibody and antigen titers using an antigen-coat, anti-IgG or IgM reporter ELISA. 96-well plates were coated with B-Gal overnight at 2-6° C., blocked with PBS-Casein-Blocker/Diluent 1×, washed with ELISA Wash Buffer, incubated with serum, washed with ELISA Wash Buffer, incubated with either a mixture of goat anti-rat IgG1-HRP, goat anti-rat IgG2a-HRP, and goat anti-rat IgG2b-HRP (each at a 1/5,000 dilution) or goat anti-rat IgM (1/5,000 dilution), washed with ELISA Wash Buffer, incubated with TMB Substrate Solution for 30 minutes and ELISA Stop Solution was added to the wells. Absorbance in the plate wells was measured at 450 nm. Except where noted above, incubations were for 1.5 to 2 hours at ambient temperature.

### Determination of IgM and IgG Concentration in Rat Serum.

[0141] Rat serum samples were also analysed for the concentration of Total Rat IgG1, Rat IgG2b, and Rat IgM using a Double Antibody ELISA Sandwich assay format. Total Rat IgG1, Rat IgG2b, and Rat IgM concentrations were calculated using standard curves generated individually for each isotype. 96-well plated were coated with the respective isotype specific capture antibody (either mouse anti-rat IgG1, mouse anti-rat IgG2b, or goat anti-rat IgM) overnight at 2-6° C., blocked with PBS-Casein-Blocker/Diluent 1×, washed with ELISA Wash Buffer, incubated with serum, washed with ELISA Wash Buffer, incubated with the respective detecting antibody (either mouse anti-rat IgG or goat anti-rat IgM), washed with ELISA Wash Buffer, incubated with TMB Substrate Solution for 30 minutes and ELISA Stop Solution was added to the wells. Absorbance in the plate wells was measured at 450 nm. Except where noted above, incubations were for 1.5 to 2 hours at ambient temperature.

TABLE 1
PCR* conditions to detect human IgH and IgL integration and expression

| | Primers | Annealing Temp (Tm-5) | Fragment size | |
|---|---|---|---|---|
| IgH | | | | |
| Hyg (5′ BAC6) | Hyg 3′ F - 459 | 54° C. | ~400 | bp |
| V4-34 (BAC6) | 205-206 | 65° C. | ~1 | kb |
| V4-28 (BAC6) | 203-204 | 65° C. | ~1 | kb |
| V3-11 (overlap BAC6- | 448-461 | 60° C. | ~500 | bp |
| BAC3) | | | | |
| V1-8 (BAC3) | 371-372 | 60° C. | ~300 | bp |
| V4-4 (BAC3) | 393-396 | 60° C. | ~750 | bp |
| V6-1 (BAC3- | 359-360 | 65° C. | ~350 | bp |
| Annabel) | | | | |
| JH (Annabel) | 368-369 | 62° C. | ~250 | bp |
| μ-γl (Annabel) | 583-535 | 62° C. | ~3 | kb |
| Ura (3′ Annabel) | 241-253 | 56° C. | ~3 | kb |
| Igκ | | | | |
| KDE | 313-314 | 66° C. | ~600 | bp |
| cKappa | 307-308 | 64° C. | ~600 | bp |
| V4-1 | 333-334 | 60° C. | ~300 | bp |
| V1-5 | 329-330 | 64° C. | ~400 | bp |
| V1-6 | 331-332 | 60° C. | ~300 | bp |
| V3-7 | 309-310 | 66° C. | ~700 | bp |
| V3-15 | 311-312 | 66° C. | ~500 | bp |
| Igλ | | | | |
| V3-27 | 215-216 | 67° C. | ~400 | bp |
| V3-19 | 213-214 | 67° C. | ~700 | bp |
| V2-14 | 211-212 | 67° C. | ~400 | bp |
| V middle | 168-169 | 65° C. | ~500 | bp |
| JLambda | 162-163 | 67° C. | ~800 | bp |
| cLambda | 170-171 | 67° C. | ~500 | bp |
| Enhancer | 172-173 | 67° C. | ~400 | bp |

*For DNA extraction from ear and tail clips the Genomic DNA Mini Kit (Bioline) was used._For PCRs 1 kb or less in size GoTaq Green Master mix (Promega) was used under the following conditions: 94° C. 2 mins, 32 × (94° C. 30 secs, Tm-5 (below) 30 secs, 72° C. 1 min [50 sec for Igκ/λ]), 72° C. 2 mins. Annealing temperatures were set at the lowest primer Tm − 5° C. (www.sigmagenosys.com/calc/DNACalc.asp). For PCRs > 1 kb KOD polymerase (Novagen) was used under the following conditions: 95° C. 2 mins, 32 × (95° C. 20 secs, Tm-5 20 secs, 70° C. 90 secs), 70° C. 2 mins.

TABLE 2
RT-PCR** conditions to detect human IgH and IgL integration and expression

| | Primer | Annealing Temp (Tm-5) | Fragment size | |
|---|---|---|---|---|
| IgH | | | | |
| VH1 Leader | 390 | 65° C. | ↓ | |
| VH2 Leader | 391 | 65° C. | ↓ | |
| VH3 Leader | 392 | 65° C. | ↓ | |
| VH4 Leader | 393 | 60° C. | ↓ | |
| VH6 Leader | 394 | 65° C. | ↓ | |
| VH4-39 Leader | 761 | 55° C. | ↓ | |
| Rat μCH2 | 345 | ↑ | ~1 | kb |
| Rat γCH2 | 682 | ↑ | ~800 | bp |
| Igκ | | | | |
| HuVK1 Leader | 400/474 | 63° C. | ↓ | |
| HuVK3 Leader | 401/475 | 63° C. | ↓ | |
| HuVK4 Leader | 476 | 63° C. | ↓ | |
| HuVK5 Leader | 477 | 63° C. | ↓ | |
| Hu κ C region | 402 | ↑ | ~600 | bp |
| Igλ | | | | |
| HuVL2 Leader | 388/478 | 58° C. | ↓ | |
| HuVL3 Leader | 398/479/480/482/483/481/484 | 58° C. | ↓ | |
| HuVL4 Leader | 485 | 58° C. | ↓ | |
| Hu λ C region | 387 | ↑ | ~600 | bp |

**RNA was extracted from Blood using the RiboPure Blood Kit (Ambion). RNA extracted from spleen, bone marrow or lymph nodes used the RNASpin mini kit (GE Healthcare). cDNA was made using Oligo dT and Promega Reverse Transcriptase at 42° C. 1 hour. PCRs using the GoTaq Green Master mix were set up as follows: 94° C. 2 mins, 34 × (94° C. 30 secs, Tm-5 30 secs, 72° C. 1 min [50 sec for Igκ/λ]), 72° C. 2 mins.

TABLE 3
Primer Sequences

| | | SEQ ID |
|---|---|---|
| Number | Oligonucleotide sequence 5′-3′ | NO |
| 162 | GGGGCCAAGGCCCCGAGAGATCTCAGG | 12 |
| 163 | CACTGGGTTCAGGGTTCTTTCCACC | 13 |
| 168 | GTGGTACAGAAGTTAGAGGGGATGTTGTTCC | 14 |
| 169 | TCTTCTACAAGCCCTTCTAAGAACACCTGG | 15 |
| 170 | AGCACAATGCTGAGGATGTTGCTCC | 16 |
| 171 | ACTGACCCTGATCCTGACCCTACTGC | 17 |
| 172 | AAACACCCCTCTTCTCCCACCAGC | 18 |
| 173 | CGCTCATGGTGAACCAGTGCTCTG | 19 |
| 203 | GCTATTTAAGACCCACTCCCTGGCA | 20 |
| 204 | AAAACCTGCAGCAAGGATGTGAGG | 21 |
| 205 | GCTCCTTCAGCACATTTCCTACCTGGA | 22 |
| 206 | CCATATATGGCAAAATGAGTCATGCAGG | 23 |
| 211 | CTCTGCTGCTCCTCACCCTCCTCACTCAGG | 24 |
| 212 | GAGAGTGCTGCTGCTTGTATATGAGCTGCA | 25 |
| 213 | TGGCTCACTCTCCTCACTCTTTGCATAGGTT | 26 |
| 214 | GATGGTTACCACTGGTGTCCCGGGAGTTAG | 27 |
| 215 | ATCCCTCTCCTGCTCCCCCTCCTCATTCTCTG | 28 |
| 216 | TGATGGTCAAGGTGACTGTGGTCCCTGAGCTG | 29 |
| 238 | AACAAGTGCGTGGAGCAG | 30 |
| 241 | GTACTGTTGACATTGCGAAGAGC | 31 |
| 243 | TGGTTGACATGCTGGCTAGTC | 32 |
| 253 | TGTCTGGCTGGAATACACTC | 33 |
| 275 | AAATGAGCTTCAAATTGAGAAGTGACGCAAGCATCAATGGTATAATGTCCAGAGTTGTGAGGC | 34 |
| | CTTGGGGACTGTGTGCCGAACATGCTC | |
| 276 | CCAGCACTGTTCAATCACAGTATGATGAGCCTAATGGGAATCCCACTAGGCTAGTCTAGTCACC | 35 |
| | ACATTAAAGCACGTGGCCTCTTATCG | |
| 278 | TGACCATTGCTTCCAAGTCC | 36 |
| 307 | GAGGAAAGAGAGAAACCACAGGTGC | 37 |
| 308 | CACCCAAGGGCAGAACTTTGTTACT | 38 |
| 309 | TGTCCAGGTATGTTGAAGAATGTCCTCC | 39 |
| 310 | TGGACTCTGTTCAACTGAGGCACCAG | 40 |
| 311 | GGCCTTCATGCTGTGTGCAGACTA | 41 |
| 312 | CAGGTCGCACTGATTCAAGAAGTGAGT | 42 |
| 313 | TTCAGGCAGGCTCTTACCAGGACTCA | 43 |
| 314 | TGCTCTGACCTCTGAGGACCTGTCTGTA | 44 |
| 329 | TCACGTGACTGTGATCCCTAGAA | 45 |
| 330 | CACTGTTATGCCAACTGAACAGC | 46 |
| 331 | CGTAGCAGTCCCCATCTGTAATC | 47 |
| 332 | ATGTCAGAGGAGCAGGAGAGAGA | 48 |
| 333 | CACGCCTCACATCCAATATGTTA | 49 |
| 334 | ATACCCTCCTGACATCTGGTGAA | 50 |
| 345 | GCTTTCAGTGATGGTCAGTGTGCTTATGAC | 51 |
| 346 | TGGAAGACCAGGAGATATTCAGGGTGTG | 52 |
| 359 | TTGCTTAACTCCACACCTGCTCCTG | 53 |
| 360 | TGCTTGGAACTGGATCAGGCAGTC | 54 |
| 368 | CACCCTGGTCACCGTCTCC | 55 |
| 369 | AGACAGTGACCAGGGTGCCAG | 56 |
| 371 | TGAGGAACGGATCCTGGTTCAGTC | 57 |
| 372 | ATCTCCTCAGCCCAGCACAGC | 58 |
| 383 | CCTCCCATGATTCCAACACTG | 59 |
| 384 | CTCACCGTCCACCACTGCTG | 60 |
| 385 | CTGTGCCACAAACATGCAAAGATAAGTTCCATGTGACAAGTCTGAACTCAGTGTTGGAATCATG | 61 |
| | GGAGGCGGCCGCGTTATCTATGCTGTCTCACCATAG | |
| 387 | TGCTCAGGCGTCAGGCTCAG | 62 |
| 388 | TGCTCAGGCGTCAGGCTCAG | 63 |
| 390 | ATGGACTGGACCTGGAGGATCC | 64 |
| 391 | TCCACGCTCCTGCTGCTGAG | 65 |
| 392 | ATGGAGTTTGGGCTGAGCTGG | 66 |
| 393 | TGAAACACCTGTGGTTCTTCC | 67 |
| 394 | TCATCTTCCTGCCCGTGCTGG | 68 |
| 396 | GACTCGACTCTTGAGGGACG | 69 |
| 398 | ATGTGGCCACAGGCTAGCTC | 70 |
| 400 | ATGAGGGTCCCCGCTCAG | 71 |
| 401 | ATGGAAGCCCCAGCTCAGC | 72 |
| 402 | CCTGGGAGTTACCCGATTGG | 73 |
| 412 | GGCGCGCCAAGCATCATGTCCTACCTGGCTG | 74 |
| 414 | CAAAGTACGTGGCACCTCCCTCGTCTTTCTTCCTCCTGCTCCAGCCAGGTAGGACATGATGCTTG | 75 |
| | GCGCGCCGTTATCTATGCTGTCTCACCATAG | |
| 429 | CAGTGCCAGCCTCGTCTCAT | 76 |
| 430 | AGGGGCCATCCACAGTCTTC | 77 |
| 448 | CTTCACTGTGTGTTCTTGGGATAC | 78 |
| 459 | GTGTAATGCTTTGGACGGTGTGTTAGTCTC | 79 |
| 461 | GCATAGCGGCGCGCCAAGCATCATGTCCTACCTGGCTG | 80 |
| 474 | GACATGAGAGTCCTCGCTCAGG | 81 |
| 475 | AAGCCCCAGCGCAGCTTC | 82 |
| 476 | ATGGTGTTGCAGACCCAGGTC | 83 |
| 477 | GTCCCAGGTTCACCTCCTCAG | 84 |
| 478 | TCCTCASYCTCCTCACTCAGG | 85 |
| 479 | CGTCCTTGCTTACTGCACAG | 86 |
| 480 | AGCCTCCTTGCTCACTTTACAG | 87 |
| 481 | CCTCCTCAYTYTCTGCACAG | 88 |
| 482 | GCTCACTCTCCTCACTCTTTGC | 89 |
| 483 | CCTCCTCTCTCACTGCACAG | 90 |
| 484 | GCCACACTCCTGCTCCCACT | 91 |
| 485 | ATGGCCTGGGTCTCCTTCTAG | 92 |
| 488 | ATTACTACTACTACTACTACATGGACGTCTGGGGCAAAGGGACCACGGTCACCGTCTCCTCAGG | 93 |
| | AAGAATGGCCTCTCCAGGTC | |
| 490 | CTGTCGTTGAGATGAACCCCAATGTGAG | 94 |
| 534 | GGAACTGATGTGATCTCAGTCACACAGCTAATGCAAAGGTCAGCAGGCTGTTTACTGCCTGGAG | 95 |
| | GTTCATCGCCCAATTCCAAAGTCAC | |
| 535 | CTAGTCTGCATGGGTCTCCGCAAAC | 96 |
| 550 | CTGGTATAATCATAAGTCTCCACTTAATAGTTCTGTAGACAGAATCTTCATTTAGACTTACAGAC | 97 |
| | CGCGGCCGCACCGCAGGGTAATAACTG | |
| 561 | GCAACCCTTCTTGCCACTCATGTCCCAGCTCTCACCATGTGACATAGCCTGTTAACAATTCGGTCG | 98 |
| | AAAAAAGAAAAGGAGAG | |
| 562 | AATGTTCTTAGTATATATAAACAAGCTACTCCCAATTCATAGTCAACTAAGTTAACATTCCACATG | 99 |
| | TTAAAATAGTGAAGGAG | |
| 566 | TTAACAGGCTATGTCACATGGTGAGAGCTGGGACATGAGTGGCAAGAAGGGTTGCCAGACTCCCC | 100 |
| | CTTTACCTCTATATCGTGTTC | |
| 570 | CTTAGTTGACTATGAATTGGGAGTAGCTTGTTTATATATACTAAGAACATTTGTCAGAAGCTCTTT | 101 |
| | CTTGTTTATTCCCAGTTTGC | |
| 583 | CATGTCCGTATGTTGCATCTGC | 102 |
| 682 | GGGAAGATGAAGACAGATG | 103 |
| 761 | TGGAGTGGATTGGGAGT | 104 |
| 878 | GCGATCGCAAAGACGAAAGGGCCTCGTG | 105 |
| 879 | ACCTGGTGATCGCCAACAAATACTACC | 106 |
| 1066 | GCGGTGGGTCTCCCACGGGGGCAAACAGCAGTGGTGGAC | 107 |
| 1088 | GGTGAGCGTACGGTTATCTATGGTGTCTCACCATAGCTGTCAGCTGGAAGCAGTTAAGGTTGGCCT | 108 |
| | TTGTCTGTATTCGTACGCACACGCTTTTCAATTCAATTCATC | |

### Results

### The Human IgH and IgL Loci

[0142] Construction of the human Ig loci employed established technologies to assemble large DNA segments using YACs and BACs (Davies et al. Nucleic acids research 20, 2693-2698 (1992); Davies et al. Biotechnology (N Y) 11, 911-914 (1993); Wagner et al. Genomics 35, 405-414 (1996); Popov et al. Gene 177, 195-201 (1996); Mundt et al. J Immunol 166, 3315-3323 (2001)). As multiple BAC modifications in E. coli frequently deleted repetitive regions such as switch sequences and enhancers, a method was developed to assemble sequences with overlapping ends in S. cerevisiae as circular YAC (cYAC) and, subsequently, converting such a cYAC into a BAC. Advantages of YACs include their large size, the ease of homologous alterations in the yeast host and the sequence stability, while BACs propagated in E. coli offer the advantages of easy preparation and large yield. Additionally, detailed restriction mapping and sequencing analysis can be better achieved in BACs than in YACs.

[0143] Sequence analysis and digests identified gene clusters of interest and ensured locus integrity and functionality to secure DNA rearrangement and switching over a wide region as shown in FIG. 1A and FIG. 1B. As shown previously, overlapping regions may generally favor joint integration when co-injected into oocytes (Wagner et al. Genomics 35, 405-414 (1996)). Thereby, insertion of BAC6-VH3-11, a 182 kb AsiSI-AscI fragment, with BAC3, a 173 kb NotI fragment, and BAC3-1N12M518 (Hu-Rat Annabel), a 193 kb NotI fragment, led to the reconstitution of a fully functional transgenic IgH locus (HC14) in the rat genome. Similarly, injection of BAC9, BAC (14+5) and BAC3-1N12M518, led to the reconstitution of a fully functional transgenic IgH locus (HC30) in the rat genome.

[0144] Similarly, the human Igκ locus was integrated by homologous overlaps. The human Igλ locus was isolated intact as a ˜300 kb YAC and also fully inserted into a rat chromosome. The integration success was identified by transcript analysis which showed V(D)J-C recombinations from the most 5′ to the most 3′ end of the locus injected. Multiple copies were identified by qPCR (not shown) and it is likely that head to tail integrations occurred. In all cases, transgenic animals with single-site integrations were generated by breeding.

### Breeding to Homozygosity

[0145] The derivation of transgenic rats by DNA microinjection into oocytes, their breeding and immunization is comparable to the mouse. However, ZFN technology to obtain gene knock-outs has only been reported recently (Geurts et al. Science 325, 433 (2009); Flisikowska et al. PloS one 6, e21045 (2011)). Silencing of the rat IgH locus by J_{H} deletion using ZFN KO technology has been described (Menoret et al. European journal of immunology 40, 2932-2941 (2010)) and a manuscript describing silencing of the rat IgL loci, targeting of Ck and deletion of J-CA genes, is in preparation. We derived multiple founders with integrated human Ig loci and silenced endogenous Ig production; all analyzed by PCR and FISH with complete trans-locus integration selected and interbred (Table 4). Several founder rats carried low translocus copy numbers; with the rat C-gene BAC in OmniRat™ likely to be fully integrated in 5 copies as determined by qPCR of Cu and Ca products (not shown). Identification by FISH of single position insertion in many lines confirmed that spreading or multiple integration of BAC mixtures were rare; an advantage for breeding to homozygosity, which was achieved.

TABLE 4
Generated rat lines: transgenic integration, knock-out and gene usage

| | human V_{H} | | | human | | | | |
|---|---|---|---|---|---|---|---|---|
| | VH | | human | Igl | | | | |
| | BACs | rat C_{H} | Igk | Igl | ZFN KO | | | FISH |
| rat | about | (Annabel) | BACs | YAC | J_{H} | Igκ | Igγ | rat |
| line | 400 kb | 193 kb | 300 kb | 300 kb | KO | KO | KO | chromosome |
| HC14 | ✓ | ✓ | | | | | | 5q22 |
| HC30 | ✓ | ✓ | | | | | | 15q24 |
| OmniRat | ✓ | ✓ | ✓ | ✓ | ✓ | ✓ | ✓ | homozygous |
| | | | | | | | | KOs |
| LC#79 | | | ✓ | | | | | 17 |
| LC#6.2 | | | | ✓ | | | | 6q23 |
| #117 | | | | | ✓ | | | 6q32 |
| #23 | | | | | | ✓ | | 4 |
| #35 | | | | | | | ✓ | 11 |

[0146] Rats carrying the individual human transloci-IgH, Igκ and Igλ-were crossbred successfully to homozygosity with Ig locus KO rats. This produced a highly efficient new multi-feature line (OmniRats™) with human V_{H}-D-J_{H} regions of over 400 kb containing 22 functional V_{H}s and a rat C region of ˜116 kb. DNA rearrangement, expression levels, class-switching and hypermutation was very similar between the different founders and comparable to wt rats. This is probably the result of the associated rat constant region accommodating several Cs and with the 3′E (enhancer control) region in authentic configuration. OmniRat animals carrying the HC14 heavy chain locus were bred with OmniRat animals carrying the HC30 locus to generate OmniRat2. OmniRat2 animals contain two heavy chain loci containing 43 functional VHs.

### B-Cell Development in the Knock-Out Background

[0147] To assess whether the introduced human Ig loci were capable of reconstituting normal B-cell development flow cytometric analyses were performed. Particular differentiation stages were analyzed in spleen and bone marrow lymphocytes (Osborn et al. J Immunol 2013; 190:1481-1490), which previously showed a lack of B-cell development in JKO/JKO rats (Menoret et al. European journal of immunology 40, 2932-2941 (2010)), and no corresponding IgL expression in κKO/κKO as well as in λKO/λKO animals (data not shown). Most striking was the complete recovery of B-cell development in OmniRats compared to wt animals, with similar numbers of B220 (CD45R)+ lymphocytes in bone marrow and spleen. IgM expression in a large proportion of CD45R+B-cells marked a fully reconstituted immune system. Size and shape separation of spleen cells was indistinguishable between OmniRats™ and wt animals and thus successfully restored in the transgenic rats expressing human idiotypes with rat C region. Moreover, the small sIgG⁺ lymphocyte population was present in OmniRats (Osborn et al. J Immunol 2013; 190:1481-1490).

[0148] The analysis of other OmniRat lymphocyte tissues showed that they were indistinguishable from wt controls and, for example, T-cell subsets were fully retained (data not shown), which further supports the notion that optimal immune function has been completely restored.

### Ig Levels in Serum

[0149] To gain unambiguous information about antibody production we compared quality and quantity of serum Ig from HC30 and HC14/HC30 animals (FIG. 4) The results demonstrated that animals with one Ig locus (HC30) expressed similar amounts of IgM and IgG in serum compared to animals with two heavy chain loci (HC14 and HC30).

[0150] ELISA analysis of serum from immunized OmniRat animals with one HC locus (HC30) or two HC loci (HC14 and HC30) revealed similar titers of anti-beta gal IgM and IgG in such animals (FIG. 5).

### Diverse Human H- and L-Chain Transcripts

[0151] Extensive transcriptional analysis was carried out using blood lymphocytes or spleen cells from transgenic rats with functional endogenous Ig loci. RT-PCR from specific human V_{H} group forward to Cu or Cy reverse primers, showed human V_{H}DJ_{H} usage. For L-chain analysis group specific human VK or Vλ forward primers were used with Cκ or Cλ reverse primers.

[0152] In addition, B-cells from animals were collected, RNA was prepared and reverse transcribed, and the resulting cDNA was used as template to amplify the full variable region of the Ig heavy chain rearranged locus (the VH region). This amplified product was then prepared for next-generation sequencing (NGS) and the full VH repertoire of each animal was determined by NGS. After post-processing and quality control of the raw NGS reads, the V-gene usage of each animal was determined by aligning each unique VH sequence to the germline V-gene reference sequence. The percent V-gene usage was calculated as the number of VH sequences using a particular V-gene divided by the total number of VH sequences in that animal. Of the 43 total human V-genes introduced on the transgenes in OmniRat2, we detect 33 V-genes expressed at a level greater than 0.1% in a rearranged IgG transcript.

[0153] The results of the RT-PCR VH-gene expression analysis and NGS repertoire analysis are summarized in FIG. 1A and FIG. 1B. These result showed the use of all integrated human V_{H} genes regarded as functional (Lefranc & Lefranc The immunoglobulin factsbook. FactsBook Series, Academic Press, GB, 45-68 (2001)) in combination with diverse use of D segments and all J_{H} segments.

[0154] The results clearly demonstrate that addition of more variable regions provided by the two loci (HC14+HC30) leads to an even broader antibody repertoire. In conclusion, we have demonstrated that antigen specific high affinity Abs of potentially any class can be produced in transgenic animals with one or two Ig heavy chain loci. This technology will allow the production of fully human Abs of any class or fragments thereof in response to antigen challenge for use as therapeutic or diagnostic agents in man. By using different loci our technology also allows for the production of high affinity matured antibodies from rodents for use as reagents, diagnostics or for the treatment of humans.

### DISCUSSION

[0155] A combination of human and rat genes to assemble a novel IgH locus has resulted in highly efficient near normal expression of antibodies with human idiotypes. Moreover, integration of the human Igκ and Igγ loci revealed that chimeric Ig with fully human specificity is readily produced and that association of rat C-regions with human L-chains is not detrimental. Advantages of using part of the rat IgH locus are that species-specific C regions and enhancer control elements are kept in their natural configuration, with essentially only the diverse human V_{H} D J_{H} region being transplanted. Furthermore, expression of antibodies with rat Fc-regions allow normal B-cell receptor assembly and optimal activation of the downstream signalling pathway essential for the initiation of highly efficient immune responses. In particular, the quality of an immune response to antigen challenge relies on combined actions of many receptor associated signalling and modifier components (see: www.biocarta.com/pathfiles/h bcrpathway.asp).

[0156] The approach of using YACs and BACs, and interchanging between the two, has the advantage of both, speed and the ability to check integrity when making constructs of large regions by overlapping homology. Several founder rats carried low translocus copy numbers; with the rat C-gene BAC in OmniRat likely to be fully integrated in 5 copies as determined by qPCR of Cμ and Cα products (not shown). Identification by FISH of single position insertion in many lines confirmed that spreading or multiple integration of BAC mixtures were rare; an advantage for breeding to homozygosity, which was achieved. Little was known whether extensive overlapping regions would integrate, such as to maintain the full functionality, essential for DNA rearrangement. Previously, overlapping integration has been reported but for much smaller regions (<100 kb) (Wagner et al. Genomics 35, 405-414 (1996); Bruggemann et al. European journal of immunology 21, 1323-1326 (1991)) and our results suggest that desired integration by homology or in tandem is a frequent event. This cases the transgenic technology substantially as no laborious integration of large YACs into stem cells and subsequent animal derivation therefrom has to be performed. (Mendez et al. Nature genetics 15, 146-156 (1997); Davies et al. Biotechnology (N Y) 11, 911-914 (1993)) In addition, ZFN technology, also performed via DNA injection (Geurts et al. Science 325, 433 (2009); Menoret et al. European journal of immunology 40, 2932-2941 (2010)), produced Ig KO strains easily and may well be the future technology of choice for gene disruptions and replacement. Silenced endogenous Ig gene expression in OmniRats, containing human-rat IgH and human IgL loci, has the advantage that no interfering or undesired rat Ig could give rise to mixed products. Interestingly, immunization and hybridoma generation in OmniRats still producing wt Ig revealed that many products were fully human, human-rat IgH and human IgL, despite incomplete Ig KOs. Here, despite the extensive number of wt V genes, it was remarkable that the introduced human genes amplified readily and thus showed to be efficient expression competitors. This is in line with the observation of generally good expression levels of all our integrated transgenes, which favorably compete with the endogenous loci. Previously in mice expressing a human antibody repertoire, Ig KOs were essential as little expression of human products was found when wt Ig is released (Bruggemann et al. PNAS 86, 6709-6713 (1989); Mendez et al. Nature genetics 15, 146-156 (1997)).

[0157] It is possible that the production of fully human Ig loci even in Ig KO mice is suboptimal as strain specific cis-acting sequences are required for high-level expression. In the mouse an enhancer region downstream of Cα plays a vital role in class-switch recombination (Vincent-Fabert et al. Blood 116, 1895-1898 (2010)) and it is likely that elements in that region may facilitate hypermutation (Pruzina et al. Protein engineering, design & selection: PEDS 24, 791-799 (2011)). This may be the reason why immune responses and generation of diverse hybridomas at high frequency may be difficult in mice carrying even a large fully human locus (Davis et al. Cancer metastasis reviews 18, 421-425 (1999); Lonberg Current opinion in immunology 20, 450-459 (2008)). As the chimeric human-rat IgH locus facilitates near wt differentiation and expression levels in OmniRats, it can be concluded that the endogenous rat C region and indeed the −30 kb enhancer sequence 3′ of Cα are providing optimal locus control to express and mature human V_{H} genes. Another region, Cδ with its 3′ control motif cluster (Mundt et al. J Immunol 166, 3315-3323 (2001)), has been removed from the chimeric C-region BAC since silencing or a lack of IgD did not appear to reduce immune function 37. Normally, mature IgM⁺IgD⁺ B-cells down-regulate IgD upon antigen contact, which initiates class-switch recombination (Chen Immunol Rev 237, 160-179 (2010)). Thus, switching may be increased without IgD control, which is supported by our finding that IgG transcripts and serum levels are significantly lower when the Cδ region is retained in transgenic constructs (data not shown).

[0158] The production of specific IgG in OmniRats is particularly encouraging as we found that in various immunizations mAbs with diversity in sequence and epitope, comparable to what was produced in wt controls, could be isolated via spleen and lymph node fusion. V-gene, D and J diversity was as expected and nearly all segments were found to be used productively as predicted (Lefranc & Lefranc The immunoglobulin factsbook. FactsBook Series, Academic Press, GB, 45-68 (2001)). This was in stark contrast to mice carrying fully human transloci where clonal expansion from a few precursor B-cells produced little diversity (Pruzina et al. Protein engineering, design & selection: PEDS 24, 791-799 (2011)). Since the number of transplanted V-genes is only about half of what is used in humans we anticipated to find restricted immune responses and limited diversity when comparing OmniRats with wt animals. However, this was not the case and a comparison of CDR3 diversity in over 1000 clones revealed the same extensive junctional differences in OmniRats as in wt animals. The few identical gene-segment combinations were further diversified by N-sequence additions or deletion at the V_{H} to D and/or D to J_{H} junctions and also by hypermutation. Thus, it is clear that the rat C region sequence is highly efficient in controlling DNA rearrangement and expression of human V_{H}DJ_{H}. Extensive diversity was also seen for the introduced human Igκ and Igγ loci, similar to what has previously been shown in mice (Nicholson et al. J Immunol 163, 6898-6906 (1999); Pruzina et al. Protein engineering, design & selection: PEDS 24, 791-799 (2011); Popov et al. The Journal of experimental medicine 189, 1611-1620 (1999)). Hence, substantially reduced efficiency in the production of human antibodies from mice (Lonberg Nature biotechnology 23, 1117-1125 (2005)) has been overcome in OmniRats, which diversify rearranged H-chains reliably and extensively by class-switch and hypermutation to yield high affinity antibodies in bulk rather than occasionally. The yield of transgenic IgG and the level of hypermutation, impressively utilized in antigen-specific mAbs, showed that clonal diversification and production level are similar between OmniRats and wt animals. Routine generation of high affinity specificities in the subnanomolar range was even accomplished by different single immunizations and again compares favorably with wt animals; results that have not been shown in transgenic mice producing human antibody repertoires from entirely human loci. (Mendez et al. Nature genetics 15, 146-156 (1997))

[0159] In summary, to maximize human antibody production an IgH locus that uses human genes for antibody specificity but rodent genes for control of differentiation and high expression should be regarded essential. L-chain flexibility is a bonus as it permits highly efficient human IgH/IgL assembly even when wt Ig is present. For therapeutic applications chimeric H-chains can be easily converted into fully human Abs by C-gene replacement without compromising the specificity.

[0160] All patents and patent publications referred to herein are hereby incorporated by reference.

[0161] Certain modifications and improvements will occur to those skilled in the art upon a reading of the foregoing description. It should be understood that all such modifications and improvements have been deleted herein for the sake of conciseness and readability but are properly within the scope of the following claims.

The application's sequence listing, which the Patent Office published only in electronic form, follows.

SEQUENCE LISTING (108 sequences)

SEQ ID NO: 1 - DNA, 30702 bp, Rattus rattus
  variation 12962..13011: note = n is a, c, g or t
  source 1..30702: mol_type = genomic DNA
tgctactgagccaccttgcctgcccctactccttaaataaactctgtgctcatccaaagtatccctgcacttccatccagtgcctgtccatcatccttagggtctacaaaacactgggaggggtcagggcccagggaaggaggaacccccaccacctgagcttgtaaggcctcagagactctgaaggacctacatgcctagagtatatgtgtatgcatgtatacgtattagtgagtgcctttgcgtgtgtacctgtgtgtaacaagagaggagtgagtttgtgcgtgcctacgggtttatataggtatgtatatgggcataagtgcatacgcctttaagtgtgagcatatctgtgtccccgtgagcacatgtgtgtctgtgtatgcctatgagtgtgcacgtatctgtgtatgctcatgttggtggaaacatgtgtgcctatagtgtgtgtacctgccaggtggatgtgcaatgaaagggaggtgagaatgggggtgaagtccgagatgagcagattcagccaagacaggcaaacctcaggggagagtcccaagagcagtgggttgctgcagaggtactctgaatggtacttctgaatggtggtgtggctgtctgagtataagattacagcttttgtcccaaacaagaaagggatagatggagcaagagagtagcaagaccaaggctggtactgcctgggagtcacaataggaacggtagaggagtgaggagatgaatccaaggggcactgggaagaagatgccacccaccctcagtgggccagccctgaatggagacgtgcatagccactcagggtgaccactgactcatgagaaagagacataacatggcacagacagccctcagcagcaccctgctctgcatatatgcacatgggcatacaccctggtctgcatacaggtacatgggcatacacgcacatacatttgcacactcacacagacccgaaccctggaggaggacgaagttcacagcccacacgcagcttctggaaagcaatgggagtcccctcccaagcccaaccatgacaactcatggacaagtctataagctcctccaggtggcccctttctaacctaagtctcccttcccatcctgagcccaagtataacaaaccagaaacagggtatgtggcaagctgggaaaagacaggagcaggccatagagaccactctcacacaggccttggcctcctccatgggcacccctagaacacaaagttctacaaccaggtacacttggcacccagatgcccacaagagggcagtggggcccctgctcctgtctcacgggccttcagaacctctccaggggcctggtttctagcaacttccctctgctgtcagagcaaggcccatgcacaccctggataccctccagcttgaaagtccacttccccgaggatagcaaaagcgacaggccagctttggaaacctgacccagaaaagcacgatagccacccatggaacccaaggcctggtccaaaacagaattctagtaaggaggagccaataggtgaaagactgaacacacacagggagagaagacagaggagcacgatagtcgagagaggggggctggtgggtgaggcgatgagtgagtgactggaacaaggttgggtggatatgcagatgaatgatgggaatggtggatggactgatggatggctgcagtgacagaaatatgagtgactgagtatcggcacacagtccctacctccacttaaaatcaaagttctatgcgcggagactctgagggcagtggggttgtctctaccgggagactttagtgttggttaacccccccccaagttctttataatgcaacagaatcctctgaccacatgtccaccccttggtattccaacctcggcccagaaatcaccttggcctgtatctgtttgagagtgtccgatcttaccgaaccctagtacccaggccaagttcaacctaagaactggggcttttgtgaggtgttgctaaatgtctagagaggtctgagacaagtggccttgggctcaaactcttctcagagcctcaaagacagaaacaactctcttaccatgatagttctctaattaagatcccctgagggaaagagagagagtcaggtcttggggggcatctcaagaacttcaaggattccagccccttacctgggaccctgccttctcattatcccagaacaagtcccttctcagagataaggaacccctgccaccaccgtccccaaagcccaagggggcatagaaacagaggccttaagcctgagcccccatccccatgggtttggatctagaaggtcatctatgtcttacagaatgccaagagccaccttcctacgtgatactggaccagtcacaagacatcctggaggaagagaccccgggtgccagtctgtggcccaccgctgtgaccttcctcaccctcttcctactgagcttgttctacagcacagcactcaccgtcacaactgtacgaggcccatttggcagcaaagaggtcccccagtactgaccaggagccagccacaggtggctgtcatggagacggtggggtacagggtgggggcaggggccttgaggatttactcagcccctccacatgtggccttgcaacccttcacagacatcaaggaagtggaaggaagtagaaggaaattatggcagcacttcctgggtttaacccagtcttccagaagccaggctgagacctcagcaaaagcaaagacataacccaactccaggatcctcccctctggctgaccacttgtgtctttgcacggatgaagcttggagaaagtcctctatgtttcagagactgatgtgacagcttcccacccgactcccatactttgctgagcaataaactggtgcaaaagcacagtttcttactctcaaaaacaaaagttaacaaaggattgggtgagggggtcagagatagtgtggtggtgccatgctaaactgttgcttacggtatagaatgtggcagcattgggcagggcagacacagggtgaccactgtctagtatccgagacaaccgtgtgtagctgtagccaagatgaacactgactgacttcaacaagtatttgtggcctcttcagacccaataccaggccattagcttgatctctggacctgacttctaaacatttggcctctgtgaacacccttgccaaacactggtcctggttgtgaaccttggtcctgaatactgagccttatcttggtaactgaaccataatcctgatccctgacctcagtcacgatcatgaaaccctggtcctggccactcgttccaataactggtccctagtcctgagccctgagtcctggtccaggtcactgaatcctggtcatgatcaatgggtttggtcctcattcctgagcctagtcttgatcactgatcactggttctgatcattaacaactaacctgatcactagtccccattcctaatcactgggccgcgatactgatcactgaaccctgtttctaaacaatgtgtagtgaaatgtatggtaaaacctttgcatctggctttgagtgaaatgtttcggcagacctttgctatgttttgggttagtcaggaaaggctgagaaatggttttgaggctgtttgaaccttgaagaaatgttgtctccctggacaatctgcacttggtactacattaaggtttgcagttgcacacaccttggtcctaaacactcctggcagacttagaactcttacgtttgattatggctagccatagttgaaaagggctgagagttgtatgggtggtctgctctctctcgcagcaagggcaagatgactttggtagttgaaaactttcccagccccaactaactctgtataatgtttgaataaagtaacggcagtaggctagttgtggttaatttttattccaagaagaatgaacccctctgctccttcagaaaaggaaggcttagcattttggtgagcttctctctactgaggcacctatgaccaactcagtgttctttgattcctgtcaccacatccagtcttgatcactaagtgccagtcctcatcactaaaccctggtctccaccagtctgcttgggttctgataatcagactcacattctgataactgggccctgattctggtcactagctctttgccctggtcatggacatttgaccctagtccacggcactgagttctgggcatggaccctgggccctagtcctaggtactgggttctggttctaacaactaggtcctgtactgatcaatgggccctgacctagacattgggccctggtcctcaacatcaacttctaagcctgaactctagccccaaattctgcttatcaacactggtcctggaccttggtcctcatcacacatccattctctgagacccaaggaatcagtggtattttgcaagaagtccctttgatattccaagcctcattctcattaggaagatctcttcaggggattcctgcagaaggttccagaatccccaccacactgttcacatactgggctgcaactgggacagtgaccccttttgctcatggaaacaaagcaggcccaggccctgtgagctggagcctctggcctggggtctacagatgtggggtcagcattgtggagaaggtttgcagggcaggtgtgggggtagggcagggatggtcacattagcatcttgtttttctttcttctgaagtctctgttttctatcacctgctgaaacattcaaagtagctccaagctgaggccagctgagtcatcctgagcctatctcagcccaggtgcctcaaaacagagctactgttctgagaatcacaccaccctggaccaggccaggtgggtctggggctggatgaggggtcagagccaggggagccctgacagggactgagaaggccccaacccccatcactcaaggttctccacaaccatccacagtcatgccttagtgaggccatgttctgtcccaatgagaacaagtccaattaagattaagtctggtcttcccagggtcattcagtgtcaaggagtgtcaaccaaggccagccaaggccagcctgaggtcagccagcatcacccaaggacacacaactattctagtagacaactagaatagtcagctcaacagggccctggtgatgcaaaatggagagtgtattcctgccagacagggctccacagataggctccctcactgcatatgacctccctgaatgtttcccacactgcagttggttctagactacttcttgataagcatgcagaaagataacaggataagaaattttatgcagagaacagaagtatctacggaatagaatagaagatagatagtagaagtctgctacaggccccagtggagtctctttgtagagtcaagagatcaaacctaaactgagtctcaggattgagtccagtacagaagcaaccttcaggatgctaaagaccatacaggcaatggacagaatggagtccagacagaccaatgagtggacagtccaatctcacataatgaaccatgtcaagagcagatagtgagccaaagaaggctctgggacactcggagattctcggcctctggatctcctgatgtatataccaggtgatcaagtgacagtctagtggagccattgccatcacagtgtcaggtgtcctccccttcatgggttccggtgaggatgtggcacctccctttagttggacgtgtacaataaattctcaggcctggtatgatttttaatgatccatgtgtttctatagtcttaattatctttaataaaattatagggtgacaccaaatttagggataagttatttatcaggctgtgcctttggaaggtgacgttatttacatagccaccaaggtgcccagtcatcggcccatcttccaaacggagtcaagggccatttgaaacagtgaaatccctcagggcaagggacacaacatggaggaatttaaaacagagtacagcttgatcttaacacacacacacacacaaacgtaagagatggaaaaggggatcaagggacacagaagtacagagaaaacaagacagtaagggatgtagagatgagaggtaaccacagggaaaggtgagacacaaagacgagaggagaaagacacagggacagaaagacccatgcaagcaagagagacagacataaggaagaaaaggcgagaagagacagacaaaggtgcagcaatgtggcccacctggtactcacaagaaggccctggcacacactccgatgagagccatgcacctacaaacacgtagacacagctccacacagacacacacggcatctgcacaactgtctgaacctcaaacaggtctgcccactccctctcctccaggcctttgtccttaggaaggcacgctgagggtaactcagtcgggatacttctgattggggctcactgaacagcctgaggctgggtccacagttgctctcactgtctggccctgtaccccaggtcatgcttcagagggaattaactgaatgcagtaaacaccgtctgtggtcagcatgtactaagggatagaaccctatcaggatttgtccaactaaggtccaaatacagagtgaagaagacgatgggggagatcagatggcagatgggagcactctggatagagctcagggatatggtggctgaggaacattacagctgccaggcttggcctttcatctcagctctaggtcaaggggaactacccaggtctctgctttgttgctggtaactatacctaagtctaagaacctcagtaagacacagaaccagtaagacgacagcctccatcgataagaaagaaaggagaaaggcagaatggataagtctctggacagatgagagcctacacccaaaaacagttcgttcagccagttaatagggtgtagccctagcacacgagagaaaacagttccacaggtgtaagggagtaaatctgtgcgaaggggtactgcttgagctcctcatggcctggtccagaagcagaagctgggcaggggcaaaggacagggtaaggcagggagacaggggcatgaaggagcctttgggactgtgtggtgagaactaggctgtgcttttactgagcctgagtttgtggcagttgcctcatggggaaggcacccagaggtaaggcagaggaaaggagtaactagggctgagggcaccacagggtctgaggaattagaggcagctatgacccatttgtcatggtatttggacatgtacttcatggacacagatctgagaaccaggcctggctctcactaaccagcaggaggtgtcccacttgtggctgtaggtctttcagcacaccatgccatgggcctctcacactggacgatctgtctgaaaggctgatgttgggaggtgggagcccaggcctggggtctgggacactgggtgacagaggtgtccagaatgtagagtgctcagagtgtgggtggggacaagctgtagagtgtccccatgaggggacaggctgagatagggactgaagtccatctacaggcttaccacactccatgctctggatgagagcactgagctctgccaccctacaacagcaggcagagcggcctccatgctaggaaagccaggcagcagggacagagttcctggatggggcaggtggaattgtctctgctcggcatcaaactaagtggaccttcagcagtaaggtcttactgtctagtcatggtggacagccaggaacatagtcaatgaacagcctgctttgtttggattcctctggagacttcctgatcaataacttgtaggcctccatgtttcatgtgacaacttacatctctctatgtataacatgggctttctgtgtagtcctgggtatcctagaacaccctgtgtagaccaggctggcttcaaacttgggacatcctcctgtctctgccttctaataaatgctgggattaaaggctgtgccaccacacacaatctaacccatttcttctgggaataacactgttcacccagccatacactgagttaaaattccttaataaatgttagttcatttacaaaatagtggatttccataaggcttcttcatggatcctaatccaacttttaccttctcttttccccaatcctccaatccccctattcccacttaaatctgaaatccccctccctccattttcaagctgcctgtgttctatgtcccctcatattgtttttttcttgtgtggaggtttgcagatttgaatgcaggaacccttcactggggctaagcctcctgccacccagcacttcccatccccacacctcctcacgcttgatttagcccatgtcccctcatgtgtatgggtgtttctcttcagtctgaggcattactccccgtgtcctctggagagctgcctactgtcacagatacctttcttctgtttctgctagggaaagcttttatttccccttgaattttaatcattgtctgggtgtaataccctgggttgagagctgtgttctttcagaacttggactacgtctatccaggcatctggctttaaagtttctactgtggggctgcagagatggctcagtggttaaccacacatttcttcttgcagaggacttgggcttgattcctagtacctccgtggcagctaagaaccatctgtgactccaactgcacaggattcgatgcccttttctggaggtcatctggagtagtcagctcaacagggccccgggatgcagcatggagagtccatgctgacaggcagggctccacagagagagaaagacagaaacacaggccactgaaagagacagtaatggactgaggggacagagagaaacacacggacagacagacagagataacaaaacaccgacactcatagacacagagaagagaggggacagggaagttttgagagcaatgggtaggaggtgagagagacacagaggcaatacatacagagagtgactccagaagacagagtctgagaggagacactgcaagagacagagaccccaaaagggttgagagcactggatgctttcacagagaatccagattcgattcccagcaggctcatggcagctcatactgcaatcccagttccagagtgccctgaaggatccttcatgcatgtggagcacagaagcgctctctctctctctctctctctctctctctctctctctctctctctctctcagatgaaagccatgaaccagaagacagagacatgagtgaacactcctcagagacatagccacagcactcacacccagttccacacagacacatacagcacctgcctgcctgatccaaaccccaaacccattgacccactccctctcctccaggtctttgttctcagagtagcacactgagggtagctcagcctggatacttcccaaggggcctggacacacagcatgcatctctggtccacagcccccatcccttgttggccctgtaatccatgtgatgtctcaggagaagatgttgtctgagagcagggcctggtacagtgtccctggtacagtgtccctggtacagtgtccctggtacagtctctctagtaaagtctctctggtacagtttccctggtacagtcttcctggtacagtgtccctggtacagtctctctggtaaagtctctctggcacaggatgcctagtatagtctttctggtacaatctgcctggtacagtctgcctagtacagtcttcctggcacagtctatccctggtgcaggcttcaggtcaggcccaagtgtgaagagtgcagaagacagtgggcagagctgagagagcgctagtcagttttgttcagagaacagtgatggccgctccaggctactggacatcccaggtgtgcttcttacacttctcaaagctgtgggaacacaaccgaccctctactcacttcagtgtaattgcctatagcagggcatgcctctgggcatcagggagtcacacagaggcaggtaagactctagacctggggactgagaggggaaggcatgtacaagagggcctcatccttaggacacagggattcgaggcctctggatagccagtgagcaacatatgcagagtgatgaggccccaggagtctaatggacgccaggaggtcacagagctagaggcctggagggctagagtctgtgggaagggggactgcttaggttcttcccacccatgtccaggagcagaggctgggcagggccacaggacagggtaaggcagggagacaggggcatgaaggagcctttgggactgtgtggtgagaactaggctgtgcttttactgagcctgagtttgtggcagctgcctcatggggaaggcacccagaggtaaggcagaggaaaggagtaactagggctgagggcaccacagggtctgaggaattagaggcagctatgacccatttgtcatggtatttggacatgtacttcatggacacagatctgagaactaggcctggctctcactaaccagcaggaggtgtcccacttgtggctgtaggtctttcagcacaccatgccatgggcctctcacactggacgatctgtctgaaaggctgatgttgggaggtgggagcccaggcctggggtctgggacactgggtgacagaggtgtccagaatgtagagtgctcagagtgcgggtgggaacaagctgtagagtgtccccatgaggggacaggctgaggtagggactgaagtccacccaaggctcaccacactccatgctctggatgagagcactgagctctgccaccctacaacagcaggcagagcggcctccatgctaggaaagccaggcagcagggacagagttcctggatgggacaggtggaattgtctctgctctgcatcaaactaagtggaccttcagcagtaaggtcttactgtctagtcatggtggacagccaggaacatagtcaatgaacagcctgctttgtttggattcctctggagacttcctgatcaataacttgtaggcctccatgtttcatgtgacaacttacatctctctatgtataacatgggctttctgtgtagtcctgggtatcctagaacaccctgtgtagaccaggctggcttcaaacttgggacatcctcctgtctctgccttctaataaatgctgggattaaaggctgtgccaccacacacaatctaacccatttcttctggaaacaacactgttcacccagccatacactgagttaaaattccttaataaatgttagttcatttacaaaatagtggatttccataaggcttcttcatggatcctaatccaacttttaccttctcttttccccaatcctccaatccccctattcccacttaaatctgaaatccccctccctccattttcaagctgcctgtgttctatgtcccctcatattgtttttttcttgtgtggaggtttgcagatttgaatgcaggaacccttcactggggctaagcctcctgccacccagcacttcccatccccacacctcctcacgcttgatttagcccatgtcccctcatgtgtatgggtgtttctcttcagtctgaggcattactccccgtgtcctctggagagctgcctactgtcacagatacctttcttctgtttctgctaggggaagcttttatttccccttgaattttaatcattgtctggctgtaataccctgggttgagagctgtggtctttcagaacttggactttgtctatccaggcatctggccttaaagtttctactgtggggctgcagagatggctcagtggttaaccacacatttcttcttgcagaggacttgggcttgattcttagtacctccgtggcagctaagaaccatctgtaactccagctgcacaggattcgatgcccttttctggaggtcatctggagtagtcagctcagcagggccccgggatgcagcatggagagtccatgctgacaggcagggctccacagagagagaaagacagaaacacaggccactgaaagagacagtaatggactgaggggacagagagaaacacacggacagacagacagacagacagacagacagacagacagacagacagagatagataacaaaacaccgacactcatagacacagagaacagaggggacagggaagttttgagagcaatgggtaggaggtgagagagacacagaggcaatacatacagagagtgactccagaagacagagtctgagaggagacactgcaagagacagagaccccaaaagggttgagagcactggatgctttcacagagaatccagattcaattcccagcaggctcatggcagctcatactgcaatcccagttccagggtgccctgaaggatccttcatgcatgtggagcacagaagctctctctctctctctctctctctctctctctctctctacactgtccccatgaagggacacgctgacgtacggactgaagtccacccaaagctcaccacactccatgctctggatgagagcactgagctctgccaccctacaacagcaggcacagcggcctccatgctaggaaagccaggcagcacggacagagttcctggatggggcaggtggaattgtctctgctcggcatcaaactaagtggaccttcagcagtaaggtcttactgtctagtcatggtggacagccaggaacatagtcaatgaacagcctgctttgtttggattcctctggagacttcctgatcaataacttgtaagcctccatgtttcatgtgacaacttacatctctctatgtataacacgggctttctgtgtagtcctgggtatcctagaacaccctgtgtagaccaggctggcttcaaacttgggacatcctcctgtctctgccttctaatccatgctgggattaaagcctgtgccaccacacacaatctaacccatttcttctggaaacnnnnnnnnnnnnnnnnnnnnnnnnnnnnnnnnnnnnnnnnnnnnnnnnnncagtggcacacacacatacacacacacacacacacacacacacacacacacacacacatacactctaatgaaggcagtggcgcacacacacactctcagatgaaagccatgaaccagaagacagagacatgtgtgaacactcctcagagacatagccacagcactcacacccagctccacacagacacatacagcacctgcctgcctgatccaaaccccaaacccattgacccactccctctcctccaggtctttgttctcagagtagcacactgagggtagctcagcctggacacttcccaaggggcctggacacacagcatgcatctctggtccacagcccccatcccttgttggccctgtaatccatgtgatgtctcaggagaagatgttgtctgagagcagggcctggtacagtgtccctggtacagtgtccctggtacagtgtccctgggacagtgtccctggtacagtctccctggtacagtctccctggtacagtctctctagtaaagtctctctggtacagtttccctggtacagtcttcctggtacagtgtccctggtacagtctctctggtaaagtctctctggcacaggatgcctagtatagtctttctggtacaatctgcctggtacagtctgcctagtacagtctccctggtaaagtctgtccctggttcaggcttcaggtcaggcccaagtgtgaagggtgcagaagacagtgggcagagctgagagagcgctagtcagttttgttcagagaacagtgatggccgctccaggctactggacatcccaggtgtgcttcttacacttctcaaagctgtgggaacacaaccgaccctctactcacttcagtgtaattgcgtatagcagggcatgcctctggacatcaggaagtcacacagaggcaggtaagactctagacctggggactgagaggggaaggcatgtacaagagggcctcatccttaggacacagggatttgaggcctctggagagccagtgagcaacatatgcagagtgatgaggccccaggagactgatgggcaccaggaggtcacagagctagaggccgggagggctagagtctgtgggaagggggactgcttaggttcttcccacccatgtccaggagcagaggctgagcagggccacaggacagggtaaggcagggagacaggggcatgaaggagcctttgggactgtgtgatgagaactaggctgtgcttttactgagcctgagtttgtggcagctgcctcatggggaaggcacccagaggtaaggcagaggaaaggagtaactagggctgagggcaccacaggatctgaggatttagaggcagctatgacccatttgtcattgtatttggacatgtacttcatggacacagatctgagaaccaggcctggctctcactaaccggcaggaggtgtcccacttgtggctgtaggtctttcagcacaccatgccatgggcctctcacactggacgatctgtctgaaaggctgatgttgggaggtgggagcccaggcctggggtctgggacactgggtgacagaggtgtccagaatgtagagtgctcagggtgcgggtggggacaagctgtacagtgtccccatgaggggacaggctgaggtagggactgaagtccacccaaggctcaccacactccatgctctggatgagagcactgagctctgccaccctacaacagcaggcacagcggcctccatgctaggaaagccaggcagcagggacagagttcctggatggggcaggtggaattgtctctgctcggcatcaaactaagtggaccttcagcagtaaggtcttactgtctagtcatggtggacagccaggaacatagtcaatgaacagcctgctttgtttggattcctctggagacttcctgatcaataacttgtaggcctccatgtttcatgtgacaacttacatctctctatgtataacacgggctttctgtgtagtcctgggtatcctagaacaccctgtgtagaccaggctggcttcaaacttgggacatcctcctgtctctgccttctaatccatgctgggattaaagcctgtgccaccacacacaatctaacccatttcttctggaaacaacactgttcacccagccatacactgagttaaaattccttaataaatgttagttcatttacaaaatagtggatttccataaggcttcttcatggatcctaatccaacttttaccttctcttttccccaatcctccaatccccctattcccacttaaatctgaaatccccctccctccattttcaagctgcctgtgttctatgtcccctcatattgtttttttcttgtgtggaggtttgcagatttgaatgcaggaacccttcactggggctaagcctcctgccacccagcacttcccatccccacacctcctcacgcttgatttagcccatgtcccctcatgtgtatgggtgtttctcttcagtctgaggcattactccccatgtcctctggagagctgcctactgtcacagatacctttcttctgtttctgctaggggaagcttttatttccccttgaattttaatcattgtctgggtgtaataccctgggttgagagatgtggtctttcagaacttggactttgtctatccaggcatctggccttaaagtttctactgtggggctgcagagatggctcagtggttaaccacacacgttgttcttgcagaggacttgggcttgattcttagtacctccgtggcagctaagaaccatctgtaactccagctgcacaggattcgatgcccttttctggaggtcatctggagtagtcagctcagcagggccccgggatgcagcatggagagtccatgctgacaggcagggctccacagagagagaaagacagaaacacaggccactgaaagagacagtaatggactgaggggacagagagaaacacacggacagacagacagacagacagacagacagacagacagacagacagacagacagacagacagacagacagagataacaaaacaccgacactcatagacacagagaacagaggggacagggaagttttgagagcaatgggtaggaggtgagagagacacagaggcaatacatacagagagtgactccagaagacagagtctgagaggagacactgcaagagacagagaccccaaaagggttgagagcactggatgctttcacagagaatccagattcaattcccagcaggctcatggcagctcatactgcaatcccagttccagggtgccctgaaggatccttcatgcatgtggagcacagaagctcgctctctctctctctctctctctctctctctctctctctctctctctctctcagacacacacacacacacatacacacacacacatacactctcaaatgaaagccatgaaccagaagacagagacatgtgtgaacattcctcagagacatagccacaacactcacacccagttccccgcagacacacaaatcacctgcctccctgttccaaatcccaaacccattaactcactccctctccttcaggcctttgatttcagagtagcacaccgagggtagctcagcctagacacttcccatgggacctggttacatagcgtgcacagggccacctcttgttggccctataacccatgtgatgattcaggaaaagatgttgtctgagagcagggcctggtacagtccccctggtacagtccccctggtacagtctctctggtacagtctccttggtacaggcttcctgatacagtctctctggtacagtctctctggtacaatctgcctcgtacagtctccctgatacagtctgcctggtacagtctctctggtacagtctgcctggtacagtctccctggtacagtctccctgatacagtctgcctggtacagtctctctggtacagcctctctggtacagtcggcctggtacagtctccctggtacagtctccttggtacagtctccctgatacagtctgcctggtacagtctgcctggtacagtctctctagtacagtctgcctggtacagtctgcctgatacagtctgcctgatacagtctgcctggtacagtctccttggtacagtctgcctggtacagtctgcctgatacagtctgcctggtacagtctctctggtacagtctccttggtacagtctccctgatacagtctccttggtgcagtctccctgatacagtctctctggtacagtctgcctggtacagtctccctggtacagtctccttggtacagtctccctgatacagtctgcctggtacagtctccctggtacagtctccctggtacagtctgcctggcacattctatccctggtgcaggcttcaggtcaggcccaagtgtgaagggtgcagaagacagtgggcagagctgagagagcgctagtcagttttgttcagagaacagtgatggctgctccaggctactggacatcccaggtgtgcttcttacacttctcaaagctgtgggaacacaaccaaccctctacccaattcattgtaattgtctatagcagggcatgcctctgggcatcagggagtcacacagaggcaggtaagactctagtcctggggactgtagaaggtatgtaagtacaacagggcctcatccttggaacactggtgtctcaggcttcaatacagccagtgagaaacacatgcagagtgatgtggccccaggagactgatgggcaccaggaggtcacagagctagaggcctggagggctagggtctgtgggaagggggactgcattcactcttcctatgcttgcccaggaacaactgtctatgcagggccacaggacagggtaaggcagggagacaggggcatgaaggagcctttgggactgtatgatgagagtctaggctgtgctctgactgagcctgagtttgtgacagctgtctcatgaggaagacacccagaggccagacagaggaaaagagtaatcagggctgagcggaccacagggtctggggacgtggaggtggctggcctggctcccacaggccctcagatggagctgcacatcatcccatagcatatcactctggagggcttatcaaaatggttgtgctgtgggactgggtctcaggactgaggcctgagatactgggtagcagaacatgttcagtatacagggtgctcagagtacgggggggggggggacaagctctgcagtgttcctccatgttgggacaagcagaaagaggtcttgaagctgtttgtccatccataggcctaacccatactggccctgctcatggccctagcttgggccacatatctagtgcccactgaatcatcaccatgaagactgttggaaaaccagagcctctgatgtcttcctgccttgcttgctctccctgactctcatagctcacacaggctctgccctggtccaccactgtcctcaactgtaaaccatgccaggcacagagagcaaggaatgtggtggtctcagactgtcacacacaacaatcttgtgcctttcacatccacacgcacaagcatgctcatacccctctgtcaggggtcagtggggtcttccttgggctcactcccatttctagctgctccttggtattggtgactgcggctgctgtgtcggtggctgccagagatgcttgatcggcatgacctcagatataggaatggcctggggtcaacagagtgcacacacttagggcactggccagagttctatgtagaccaaggcctctcttcctagtgtgttatttcacaaaaccttatgcaacaacatcttctattccttttattcctctttgtctgctaatggggaattttctagaaagagtgtcccctctctgtcttcctgctgtgtagacagatcttgtaggtgtgatcacagagtggtgtttcccttcttggccattttcaggccaggaactcagggccagagacagaaagtcaggaaggtaggaaagacagggagacataataaaggtgagatggagacagagaaagacaaagggagaaaagcacaggattgcagggagagacaaggagacgcccgacggaaacagacatcagggaaaagacatgattgttcctttagtaaattgctttccggagaaaagagacagcagagagacatggataggcacacaaagatacaaggagagagacaggaaacagagaaagagagaaacagagatggagaaacaacgagggagagagaagagtagagagaaagacacggagaaaaaaaatcaagaaacagaaaagacaaaagataggaagacagagaaataggccagaaatacagacagacagagagatgcctgaagatgttctctctcacctagagaaagaaagcacaggcagagataatacagagagagagagagagagagagagagagagagagagagagagagagagagagagagagaggagagaaagaggagagacacggtgttagaggagaaagcattatgttttgatagagacagagatacagcaactgaggaacagactgagcagaaagaatcccactcagagagagacagaggctaagctgggagaggcaggggtggccagagagggagacagaggagagcctgtgggacaggtcagacaccatcttggaagacccagtgacaagccagggaggtgacaggttagtgcagtttctaccccacagtccacaggctggagccacaggcctgtgtccatgtggccacaggctagctcccagcctgccaagcctgtctgtggagggattgcggagtggggctgggctgaggcaggccaggatttttccagtggagcagccagtgactgggctgagggtcactgcccaccatccccgtgattctgggtagacccaggacctggagcacacacagccttcctgtctctcccacttccctggggtgtttggaccttgcctatctcctgtcattccctcctagggtcagattccagcagtgtcgataaatgggaaaacactgaattcaatgtcaccgttaggggtcatggaacccccagccccatccccaaagctggtcaacctggccagggtggggtgaacctgcagctgcaggtgggggaatcattgatgctatttttggctcagagaatgagaaacatgtttttctgcatggaacaaacatccatttgcatgtgccccgagggccaaccctgcacagagtgagtcactcggcaggtgtgtgtgtgtgtgtgtgtgtgtgtgtgagagagagagagagagagagagagagagagagagagacagagacagagacagagacagacagagagacagagagacagagagagagacagagagagacacacacagagacagagagacagagagagacagagacagagagagacacacacacagagacagagagacagagagagagatgttgtgagcaagccctgtttcaggtactgatatctgtgcccccgtgccccagcccatgtggaaaaactacccttaggggcccattaactcatcacagtccaggccatcatggtgagccctagctgacctaagcaggttccaccctaaacatgaaggaaaataataaaggccatctgttacccagaatcctagggatggtgggcagtgaccctcagcccactcctggccgctccactggaagaatcctggcctgcctcagcccagccccactccgcaatccctccacagacaggcttggcaggctgggagctagcctgtggccacatggacacaggcctgtggctccagcctgtggactgtggggtagaaactgcactaacctgtcacctccctggcttgtcactgggtcttccaagatggtgtctgacctgtcccacaggctctcctctgtctccctctctggccacccctgcctctcccagcttagcctctgtctctctctgagtgggattctctctgctcagtctgtcagccatagttggagagagtccatctatgtttgcctctgtctctgccaattccatcagaggtctctctactaacacttgcctctgcatgtgtctcttggtccttctcctgtcttcccatctctctatctcctcatctctctgtctttctgttactccctgtctctgtctctctgtcttttctctcactgtctttatctctctgcctgtttcatggacttttctctgtctctctgtctctgtctctctgtctctctctctgtctctctctgtctctgtctctctctgcccctatctcttggtctctatctctatcttcaactccctatctttgttcctcatactcacatttacctctttcccaagcccccagtctccaggtctgcctgtttctgtctctcccttgccatgtttccctgttttattctctctcctcctgaatgctctggcttgaaactggccaagaagggaaacaccactctgtgatcacacctacaggatctgtctacacagcaggaagacagagaggcgaccctctttcaccctacagtgtctggacttggttgattccaggttactcctatactcaagtccgggactatggtggtcaagcatctctggcagccactgggacagcagctatagccaccaacatcgagccctgttagctaccaacattagctcctcaaagaggttgggtctataggcctctggtgtgaggagatgttgacagtgagaattagttcccaaggaggacaccactgtttcctgttagatggagaactacagtgggtacgaacatgcttgaacacatgagtgtcaaatgcacaagactgttgggtgtgtcacccttcccctctctgttcatggcatgactgcacactgaacacaatggtggattgggacagagtctgtgtgagttgagaatcatgaagagtgtagacacttcaaggatagtgtagacccttctagttcgtggtgatggctcacttggcactgagtttctgaccccacagggaccatggacaagggcagtatgggctgtgcctatggatacaaaagagacttcgaagcctgtattagcctgtcccctcatggaggaacacagcacagcttgtctctacccacactctgagtactctacgtcctggacacctctgtcacccagtgtcctaggtcccatccttggctcccacatcacatctgcctttcagacagatcttccagtgtgacagacccatttcatggtgctgaacaacataaacccatttcctgagggttggtgagagccggcctggttctcagatctgtgtccatgaagtacatgaccaaataccatgacaaatgggtcatagctgcctctaattcctcagaccctatgggccctcagccctggttactcctttcctcggcctggcctctgggtgccttccccatgaggcagctgccacaaacccaggctcagtcagaacatagcctagttcctaccatacagtcccaaaggttgcttcatgcccctgtctccctgccttagcctgtctgtgctcctgcacagacaagagttcctgggcaagcataggaagagtgaatgcagtccctcttccaacagaccctagccctccaggcctctagctctgtgacctcctggtgtccattagactcctggggcctcatcactctgcatgtgttgctcttgtacatgccttcccctctcagtccccaggtctagagtcttacctgcctctgtgtgacttcctgatgtccagaggcatgccctgctatagacaattacactgaagtgagtagagggtcggttgtgttcccacagctttgagaagtgtaggaagcacacctgggatgtccagtaacctggagcggccatcactgttctctgaacaaaactgactagcattctctcatctctgcccactatcttctgcacccttcacacttgggcctgacctgaagcctgcaccagggacagactttaccaggcagactgtaccaggaagactgtaccagggagattgtaccaggcagagtgtgccaggcagactgtacaaggcacactatatcagagagactttaccatgcagactgcaccagggagactgtaccagggagactgtaccagggagactgcaccagggagactgtaccaggccctgatctcagacaacatcttttactgagacatcacatggattacagggccagcaagaggtgggggctgtggaccagaggctcatactgtgttaccaggtcccatgggaagtgtccaggctgagctaccctcagtgtgctactctgagaacaaaggcctggaggagagggagtgggtcaatgggtttggggtttggatcaggcaggcaggtgctgtgtgtgtctgtgtggaggctgggtgtgagtgctgtggctatgtctctgaggagcgttcactcatgtctctgtctctggttcatggctttcatctgagagagagagagagagagaaagagagagagagagagagagagagagagagagagagagagagagcgcttctgtgctccacatgcatgaaggatccttcagggcaccctggaactgggatttcagtatgaactgccatgaacctgctgggaattgaatctggattctctgtgaaagcatccagtgctctcaacccttttggggtctctgtctcttgcagtgtctcctctcagactctgtcttctggagtcactctctgtatgtattgcctctgtgtctctctcacctcctacccattgctctcaaaacttccctgtcccctctgttctctgtgtctatgagtgtcggtgttttgttatctctgtctgtctgtctgtctgtctgtccgtgtgtttctctctgtcccctcagtccattactgtctctttcagtggcctgtgtttctgtctttctctctctgtggagccctgcctgtcagcatggactctccatgctgcatcccggggccctgctgagctgactactccagatgacctccagaaaagggcatcgaatcctgtgcagctggagttacagatggttcttagctgccacggaggtactaggaatcaagcccaagtcctctgcaagaacaacgtgtgtggttaaccactgagtcatctctgcagccccacagtagaaactttaaggtcagatgcctggatagacaaagtccaagttctgaaagaccacatctctcaacccagggtattacacccagacaatgattaaaattcaaggggaaataaaagcttcccctagcagaaacagaagaaaggtatctgtgacagtaggcagctcttcagaggacacggggagtaatgcctcagactgaagagaaacacccattcacatgaggggacaggggctaaatcaagcgtgaggaggtgtggggatgggaagtgctgggtggcaggaggcttagccccagtgaagggttcctgcattcaaatctgcaaacctccacacaagaaaaaaataatatgaggggacgtagaacacaggcagcttgaaaatggaggatgcttttagcattaaagatttaagtgtagataacagggatgggggaccggggagaggagaggagaggagaggagaggagaggagaggagaggagaggagaggagaggagaggagaggagaggagaggagaggagagatgttcagttatccaaaactaaggatccatgaagaagccttatggaaatccactattttgtaaatgaactaacatttattaaggaattttaactcagtgtatggctgggtgaacagtgttgttcccagaagaatgggttagattgtgtgtggtggcacaggctttactcccagcatttattagaaggcagagacaggaggatgtcccaagtttgaagccagcctggtctacacagggtgttctaggatacccaggactacacagaaagcccgtgttatacatagagagatgtaagttgtcacatgaaacatggaggcctacaagttattgatcaggaagtctccagaggaatccaaacaaagcaggctgttcattgactatgttcctggctgtccaccatgactagacagtaagaccttactgctgaaggtccacttagtttgatgccgagcagagacaattccacctgccccatccaggaactctgtccctgctgcctggctttcctagcatggaggccgctgtgcctgctgttgtagggtggcagagctcagtgctctcatccagagcatggagtgtggtgggcctgtggatggacttcagtccctatctcagcctgtcccctcatggggacactgtacagcttgtccccacccgcaccctgagcactctacattctggacacctctgtcacccagtgtcccagaccccaggcctgggctcccacctcccaacatcagcctttcagacagatcgtccagtgtgagaggcccatggcatggtgtgctgaaagacctacagccacaagtgggacacctcctgccggttagtgagagccaggcctggttctcagatctgtgtccatgaagtacatgtccaaataccatgacaaatgggtcatagctgcctctaaatcctcagatcctgtggtgccctcagccctggttactcctttcctctgccttacctctgggtgccttccccatgaggcagctgccacaaactcaggctcagtaaaagcacagcctagttctcatcacacagtcccaaaggctccttcatgcccctgtctccctgccttaccctgtcctgtggccctgcccagcctctgctcctggacatgggtgggaagaacctaagcagtcccccttcccacagactctagccctcccggcctctagctctgtgacctcctggtgcccatcagtctcctggggccacatcactctgcatatgttgctcactggctatccagaggcctcgaatccctgtgtcctaaggatgaggccctcttgtacatgccttcccctctcagtccccaggtctatagtcttacctgcctctgtgtgactccctgatgcccagaggcatgccctgctataggcaattacactgaagtgagtagagggtcggttgtgttcccacagctttgagaagtgtaagaagcacacctgggatgtccagtagcctggagcggccatcactgttctctgaacaaaactgactagcgctctctcagctctgcccactgtcttctgcactcttcatacttgggcctgacctgaagcctgcaccagggatagactgtgccaggcagactgtaccagagagactgtaccaggcagactgtatcagggagactgtaccaggcagactgtatcagggagactgtaccaggcagactgtatcagggagactgtaccaggcagactgtaccacacagactatactaggcatcttgtaccagagagactttaccaggcagactgcaccagggacactctaccagggacactgtaccagggacactgtaccagggacactgtaccaggccctgctctcagacaacatcttctcctgagacatcacatggattacagggccaacaagggatgggggctgtggaccagagatgcttgctgtgtctccaggccccttgggaagtgtccaggctgagctaccctcagtgtgctactctgagaacaaagacctggaggagagggagtgggttcatgggtttggggtttggatcaggcaggcaggtgctgtgtgtgtctgtgtggagctgggtgtgagtgctgtggctatgtctctgaggagtgttcacacatgtctctttcttctggtgcatggctttcatctgagagagagagaaagagagagagagagagagagagagagagagagagagagagtgtgttgctgccttcatttgagtgcttggtgggctccatgctgtacctctgccttccctgtgtgtctgtccttttgcctctcccttcctttggcctgtctctcttgtctgcatctgtctctcttgtctctccctctctgtgtctcttttctctcctgtctctgtgtctcttctttcctgtggtctctcctcatccccatgtctgcatcagtgtctatcagtctttaactctgtgtcctcttgttcccatttctgtccctctggatatttctgtctttctgtgtgtctgtcctcatctctcccagcgtccatgtctttgtgtccctttgtccccacacagtatcttctcaaatactctgtgtgcctggtcccctgtctctcattccttttctcactgctcccatcagtgtttctctgtgtctctgcttctgtgtctctgtgtgtctgtctcatgctatctctttctctctcattatctctgtctccctcagacttctctgtctttcttggtctctgtctccctctgtgtctctgtctttctgcatgtctaatgtctctgtgtctcccttagctcatctctgtctctctcaatattcccacaatcccctttattctttgtgtctctgtctctgtggtgtctctttctcagtctctctgtatttcgctctgtctctcagaatctctgtgtccctcatattatttttcgaagtgtctccctatctctttcagtaacactatttctgtttttctcagtctctctctctctctctctctctctctctctctctctctctctctctctcagaaagtctatggcacctcttctatgtgtgtcccactctggacctggatcaatcttccttcttggacctcagtttcatcagttgtgagacgataccttgccagaagtccagaggactgtctgtcctccatagtctagaccacctgtgatctgagagatattgggacaacggatgtgcagtgagggacctgcctttctgtggagccctgtctggctggaatacactctccattctgcatcaccagagccttgttgagctggctattctagttgtctactagaatagttgtgtgaccttgggtgatgctggctgacctcaggctggccttggctggccttggttgacactgaatgaccctgggaagaccagacttaatcttaattggacttgttctcattgggacagaacatggcctcactaaggcatgactgtggatggttgtggagaaccttgagtgatgggggttggggccttctcagtccctgtcagggctcccctggctctgacccctcatccagccccagacccacctggcctggtccagggtggtgtgattctcagaacagtagctctgttttggggcacctgggctgagataggctcaggatgactcagctggcctcagagtggagttattttgaatgtttcagcaggtgatagaaaacagagacttcagaagaaagaaaaacaagatgctaatgtgaccatccctgccctacccccacacctgccccgcaaaccttccccacaatgctgaccccacatctgtagaccccaggccagaggctccagctcacagggcctgggcctgctttgtttccattcagtgcctctgggaaaggcagatgagtaaaggggtcactctcccagttgcagcccagtgtgtgaacagtgtggtggggattctggaatcttctgcaggaatcccctgaagagatcttcctaatgagaatgaggcttggaatatcaaaggtacttcttgtaaaataccactgattccttgggcctcagagaatggatgtgtgatgaggaccaaggtccaggaccagtgttgataagcagaatttggggctagagttcaggcttagaagttgatgttgaggacctgggcccattgatcagtacagaacctagttgttagaatcagaacccagtgtctatgaccagagctcagtgatagggaccaagtcccaaggccaaatgatcaagaccaggacccagttgccaggaccaagatccaggtttcacaaccaaacctagttacgcagaccagaaaccattcgttggaatctggatctgaatcagagcccaatcacactactctaaaccagagttcagtgttgaggaccagggtacgtgatgagcccaagattcagagatcaagaggtggattcagtaattaagaccaggattcagagatcaggatcagggctcagttagcaggatcagggctcagtcatgtggtcatgggctcacggtccaatgtccatgcccaaaacacaactaaggacccagtggtcagaaccaaggcctgatgatcagagacaatacacactgctcagagctgaatttcagtggcaaggatgaagacataatgataaagactagggatcagtgagcagaaccagcgatgaggacccagacgcatctctgaagactagagtcagtgaccatgaccagttcaacgatcatgagtaggacttaattctgatcatacgagttcagtgatcacgaacaaggctcagtgatcatgacaagggctcagggaacaagagtgaggctcagcgatgaaaactggacctcagttatgagcccagtgatgagtaaccaggtctcggtcattagggccaggattcagtgataagaaccaagggtctctgcagggctcagtgcatcctctccccctgagactggacaaagccgcccagccacagggatggattctccagacaggcaacagcttcagggacagcccccccgtgatgcgccagagtaggggatacccaggggacttccacactctcaaagaagaaggggagaatggaacatgaagaagggactgtgaggggggaccgggaagtgggggacacagtgactgggatataaagtgaataaataaattaatggaaaatatcacatgggtgtagggaattttgaaagaataaataaaatgttaaaaatgaaaagaaaaaaagaccaagggtcaatgatcagggtgataataaataaataaataaataaataaataaataaataaataaataaataagaaaggaaagagagaaagaaaggaaggaagaaagaaagaaagaaagaaagaaagaaagaaagaaagaaagaacaaacgaactgaatgtcagaatttagggtaagatctcagtgatgaggatcagggatcagtggtttgaacgcagacacactgcccagggccattgttcaatgacgagagtcagggatcagctatcagaaccagggccagtaacgaaagccagggcccagtgaccccaaccaaaaaccagtgactaaaaccaaataaaatagaaactaggcagccacgatggtgcacacctttaatcccagaactcaggagtcaggggcagggggagttcaagacaaccctggtctacacagtgagttccaagacagccagggctacccagagaaaccctgtctagataacaaagactagaaaccatgagctcagtgatcagtggcagttcttgatgactaagaccatggtcaagaggactgatcagcaggactcagtggttagactcaggacatggtgatgatagcctctgttccagggatcagaaccaaggccaagggccaaggccatgactgagtcatcagaacagggcctctccatgagcactagtcaggcgcagccaggcctagcatgtcaatcaggcaaaattgggtatgtgtgtggtggtatgactgactatacatcgtcttagtatctgtctgaccccaccaccatcttccctgcctccgtccactcacagatctctg

SEQ ID NO: 2 - DNA, 525871 bp, synthetic construct
  misc_feature 1..525871: note = BAC6-BAC3-Annabel (FIG. 1a after integration)
  variation 474423..474552: note = n is a, c, g or t
  variation 506441..506490: note = n is a, c, g or t
  variation 518064..518468: note = n is a, c, g or t
  variation 521625..521632: note = n is a, c, g or t
  source 1..525871: mol_type = other DNA
atcgctgcggccgatcttagccagacgagcgggttcggcccattcggaccgcaaggaatcggtcaatacactacatggcgtgatttcatatgcgcgattgctgatccccatgtgtatcactggcaaactgtgatggacgacaccgtcagtgcgtccgtcgcgcaggctctcgatgagctgatgctttgggccgaggactgccccgaagtccggcacctcgtgcacgcggatttcggctccaacaatgtcctgacggacaatggccgcataacagcggtcattgactggagcgaggcgatgttcggggattcccaatacgaggtcgccaacatcttcttctggaggccgtggttggcttgtatggagcagcagacgcgctacttcgagcggaggcatccggagcttgcaggatcgccgcggctccgggcgtatatgctccgcattggtcttgaccaactctatcagagcttggttgacggcaatttcgatgatgcagcttgggcgcagggtcgatgcgacgcaatcgtccgatccggagccgggactgtcgggcgtacacaaatcgcccgcagaagcgcggccgtctggaccgatggctgtgtagaagtactcgccgatagtggaaaccgacgccccagcactcgtccgagggcaaaggaataaagatcccccgaacacaacccacagctaccaccatcaacaatatttatatatataacgtacacatagaaatcacacaaacagagtatttattcttaactacatgaactaccatcagaccgtctgggccactatataatgtgccattcataaacgtgatcactttacgtagcaggcaaccccaggtgaaaatttttcagcgagctgccagattgtcaggtgaaaaactgaaaaaaacttctgggcgatgagcttgtggcgggaaattaagtatataaagcagttagtttcttctgcttcttgtggttctgggtattcttgtaatatttggaagaatagaaaatcaagactactgcctttcttttcatattatagaggaagaaatacgcacgaacacgatatagaggtaaagggggagtctggcaacccttcttgccactcatgtcccagctctcaccatgtgacatagcctgttccccctttgccttccatcatgattgtaaagtagatcctggtgccatgcttctcacacagccttcagaactgtaagccaaatgtgcctcttttctttgtaaatcacttggcctcaggtattaatttataggaatgcaaaagagactaacacaccgtccaaagcattacacagattcaactctatttttatcaaatgaccaatataattgattacatatttagaaaaaaaatactaaaattcctatagaatcaaaaaagagtctgaatagcaaaagcaatcctaagcaaaaagaccgaagctggaagcaccacattctctgacctcaaattatactacatgaatataataagaaagacagcatgctactagtagaaaaaaatagcccagaaagaaagccaaatatctaaaaccaactgttgtttgacaaaactgacaaaaatatacactggagaaacaaccctctattcaataagtggtgccgggaaaattaggtggcttatgtggaagaatagaactagacttccatatcaccgtagacacaaattaactgaatatggattcagtgtttaaatttataaactaaaactataaaaatacttgaataaaatctaaaaagagtcctctggacattggtctaagcaaacaatatatgactaagacttcaaaagcaaatgcaataaaaacagaagtagacaaacaggatttagttgaactaaaggtcttctgcacagcaaaagaaataaccaacatggtgaccagacaatctgcaaatggaaaaaatatctggaatctattcatcttgcaaagggctaatatatagaatctacaagtaactcaaataagtcaactaaaaattacaaataacttcattaaagaatagacataaacagacatttatcaaaagaatacacagaagtggccaacacaaataagaaaatatactcagcatcaccaatcatctgataaatgtaaattagaaacaacatgatacggcatcttccaccagtcagaatggctgttattacaaataaaaacagcaggtgtttgcagacaaacataggaaaaataatgatttatatatgcttggtgagaatgtaaattagtacaacctccatgaaaaacaacatagaaatttctcaaagaactaaaattagaattaccatttcttccagtaagctgtcccagtaggcatgttcctcccaaacttttatatcagagaatgttgcctgcactcatatgtttatttcaacaccattttcaatagaaaagtcaaataatctaagtgtcaatcagtggatgattagataaaatatgatatatgtaaatcatggaatactatgcagccagtatggtatgaattcagtgtgaccagcccctggacaagggcttgagtggatgggatggatcatcacctacactgggaacccaacatataccaacggcttcacaggacggtttctattctccatggacacctctgtcagcatggcgtatctgcagatcagcagcctaaaggctgaggacacggccgtgtatgactgtatgagagacacagtgtggaaacccacatcccgagggagtcagaaaccccgagggaggaggcagctgtgctgagctgaggcagtggtgcagcagtttctttaacttccatatgatctcattttgcatcatcttctacttttatattagctaagaacttggggtagacaggtgctcctaagagatccttaacttgcccattttgatgggttttccagaagacgtgagaagccactttgttagcaaagcatcccaaatccatgccctgttctagatacatgtgagcccatttcctggtctttgcttaactgacaagctctcatcagtgcacctgggctaatttcacatcaggtagaggaacgcgttataaaggaaagctaatgttgtaatagcaattcctgcttaaaaaccttcagcttcattgtttttgtgtaatccatcagcaaattatgttagttcaaggttctcaatgggagtttctaataaatagaaaggatgtataaagcttcccctaattaaaatgaaacaattgtgaacacaacctcggtattcagccatgtctccacccttcacacccttcgccacaaaggaattttcacctctcctggaagctgggttcattttcaaattagttatttttttcaatgtaatatctcaagattatcgtatatgactattttagcagaaagtgaattatgggaacttgaactaaacaactgaaaacaaattcacaactaattaaacaagatgccagaatgtgattggctccaggctttgtaattcagcagttcatgtacccagactggaaatttacatgtcttcttgttaccttcacagcacagtcaactcccattatgtaagaaatggtgactgcattcccaagggttatgcatagatatgaaaatagactgggtaaggtgaggagttgattgtttaaattcccctctgaagaagcagcatcaactcaacaaaccacctctcttcactctgtgactagagctatgtcacaggccacatggacctaaatccttgatggatataacatgactacataaattgggctgatcatttttatgctataaaattaatagatgacactgcactccagcctgcacaaccaagcaagtcttcatctgtaaaatctaaaaaagaaaaattaataggtactgacttcgaaatttttgataataatattttcaccacccaaatttaatcacacccacatgttacctgcatcttcactgaaaagttcccagtcacgatgagttccttcaatgctccatgtgttcaaatctggacatcaagagagtccagagaataaaacacaatgacggcagtgaaactgatatatattcagcacctcttaactcaggaggactccatacaccctggcacacagctgcttttctaaatggctcacaatgactccagctcactcacagagctcagacagaaacctcccttcagggtgggagctgggtggcagggggcactcagtacccgcagaggtgaaaatgagctttcagatggaacttccctgtcacctcaacatggaatttattgtttcatttcattacctctctttccataatggttcatttcttttggcctgttcattactgatatttttcagagcaatctcacttgaatctttactcttttgcattttgtctccttgacaatgttgggaagttttacctccagcatcataacatgatctagtgatctgacacattgtgcaaacaatacctacaaattcagaacctctttgtttttctttccacaaaatataattctttctgttctgtgtatgagcatgtcttagcaaccctgtacacacccacatagatgtctacaagcctatgaattgttctctgtaaataaaaatttatctcaaattccttcaatgttcataattctgagagtgaggaaggtccttctcaatctgttcaaacaaaatgcccagagaccatccagtaggtaaggagttcacctggctctggtgtggggtctgtctctttccctctgttgtcccacaggtcagcccagttgttcacgtcctaacaagaaagcccaggtttgtcctgattttaaaacacatcaaacttctgatgactctcctgttacccacatccatggagatagattatttattatataattcagcaaactaatgtcaaatgcccaagttgcaataccgcacatcctagggtatgttcatgcaattcaatggaggagaaaatctttcagagacagatggatctgaaatgataaatatgtgggtaaggactctgggcttgagtatcattgtccagccatgtttcacaagtgtgtcctgtcagggaaggatcagagttccttgtgctctcagagggaaggggtcacagagttcctctctggttcccaggaaaggtaatcgcactaatcttcatgatcttcatgagactatcctccagtgctgacctgttacggagtttttgtctgaagttctcactgcaatccccaatctacatattttcaatcagaagtgtttagaggccaggacacatcttcaaggtcacacattgagaagtatggagatatgtcccactaccttctcctacgatctcagacagaatcccaaatttcaaaaggacacagaaggacagctctcaggtgcttttaaaaaatgacccacttccagggacagtgagcttccctgtaaccatggtggatgttctgaactacaataaacattggatggatccagtattgtttgaagtcactgtcattattacattcagctgttgtttcaatgtgtctgaaagggtaaatgactatttagatggcctgggtgtgtggttggttttatatgaatctttaagggttgaacagtactgaccctattccaaaatctgtccttgatccaggatcacactcatctctcagaccagctccttcagcacatctctttacctggaagaagaggactctgggcttggagaggggaggccccaagaagagaactgagttctcaaagggcacagccagcattctcctcccagggtgagctcaaaagactggcgcctctctcatcccttttcactgctccgtacaaacgcaccacccccatgcaaatcctcacttaggcgcccacaggaagccaccacacatttccttaaattcaggtccaactcataagggaaatgctttctgagagtcatggatctcatgtgcaagaaaatgaagcacctgtggttcttcctcctgctggtggcggctcccagatgtgagtgtttctaggatgcagacatggagatatgggaggctgcctctgatcccagggctcactgtgggtttttctgttcacaggggtcctgtcccagctgcagctgcaggagtcgggcccaggactggtgaagccttcggagaccctgtccctcacctgcactgtctctggtggctccatcagcagtagtagttactactggggctggatccgccagcccccagggaaggggctggagtggattgggagtatctattatagtgggagcacctactacaacccgtccctcaagagtcgagtcaccatatccgtagacacgtccaagaaccagttctccctgaagctgagctctgtgaccgccgcagacacggctgtgtattactgtgcgagacacacagtgaggggaggtgagtgtgagcccagacaaaaacctccctgcagggaggctgagggggcgggcgcaggtgcagctcagggccagcagggggcgtgcggagctcacggaatacaaggccgggtcaggagcaggtgcagggtgagcggggcttgctcatcttctcagtcgtctccctcctcgccagcacctcagctttccgtagaggtcctctttctttattgtgtgtggttctacttcctcacatccttgtgccaggaaagaaaggagtaaggcaaattttcctgttacaattgaagtttcaccaattactaagaactttcctgcaagtacctgcacagcccattataccttatttatatatgtatatattctaatgcttctcaccatctcttgatttgtgtcatcaatttaattgtgccctttttgaaattcatatgctgaaactttaaatccaatggatctatatcggaattttaatggtataattaatgttaaatgtggtcataaatgagaccctaatgcaatagagctgttgtctttataagaagaggaagagacaccagatacctctcacttctcacatgcactcagagaagaggccacgtggagacatagtgcactagaaggtgggcctctgcaagccaggaagaagccgcaccaagaaccaaccctgccagcaccttgatcttctacattcagactgcagaattgtaagaaaatcaatatttgttgtttaagccacccactccttttgtcttcttacgaagacccagacaggctaataccacacaactctgttagctccgtctcctggagggagaagcagccccctgaagctgggcacatcgctcagattttcacatgaattaggcaaaaacagtagctctcatataaaaactgtcacgtccctgttgggacaaggtcttttaaacaagccctggggctttgtcacaaatgttgcattttatcctttattaggacttaactaattgacaatgagtaccagctggatggaaactgaccactgaccatcttctgctgtctccttattatatcacagaaaaccacagcaacattactctatgtcttcaactttctaaatttgtactgaatctattgctaaatgaggagctacatggggtctgagttttgttaccttcttcccagtcttccccaattaccaagcatagaagatactttcagtgaaatttagctgtcaatgcccccgacaccacatcatgttttaaggtccaaggactttctttggggggctattgaaaaacacttttgaatggaaaatcctaaagcatacaacagctgaaagaatggcccctgtgcacatgaaggctgaagggatggatgatagggtacgttcctccaaggtgttcctgggcatgtgatggttggatacctcatgcatacgaaaacaaggactgaactgagatagaaacaagggccatatcctataggaaaacaagaaaaaaacgggcatccctgaagagagttaattagacttggtgggtttaagatgaatttttttccaaagttttttaatgttctaagctaaatatgaatattttcaataaactgcaaattaaaaggagaatgaatttagaagtttagacagaaaaaagccatgagggtgtagaaagcaaatccacacaaaactgtcacatggcagaggccagaatggagctgatgcagctacatcattattctgcagacctagttgagaccctttggtgtttaaggcaggtccagcagtgaagaactcctttattttttgtctggcaaagttctaatctaatcttcatttctgaaaaggatttacatggtaaagattcgtcttggcaggttttatttatttttagtcccccccaacccacgtcaatttgagtaaagtcatgtgttacgtaacaatgctgcagtcaacagtagaccacatatatgtttgtggccacataatgttgtaataccatattttcactaaactttttccatgttttgatgtgtttagatagagagatacttaccatggtgtttccatttcctgcagtgttcagtgcagtaacacgctgtacaggttagttgtctgggaaccctgcgctaatccacataccctgtgtgtagtagggtattccttgtaggtttgtgaaaattcacccttgatgcttgcacaatgatgaaattgcccagggacacatttctcaaaaagaacctctgtcaataaaccacacaccattgaatacaatccctgtgccttctgaactgaaaaccttctgctgagaaatctgttccttttctttctgttttctaaagcctcttttatttccagcaatgtggttttaaactgtgtcacattttttgtcattgggtttatcttacgtaaaatttatagagcttcttcattgtggatgaatatttgcttcccttctccaaatttggaaatattttttgctattattttgaataatttatctcttctctctctctctctctctctctctctctctctctccctctctctctctctctctctctctctctctctctctctctctctctctccccctctctcccttcactaccccttttgtcttgtctttgtataactcctcaaatgcgtagttgagtgtttagtgtctttcctggcccataagtcttgaactcttttttatttctttcacttaaatttttcttctctgtctctactatttcaaatgatctttctttgagtttactgtttcttctattacttgatctagtttggtctaaaatcttgttaaaatttttggctgtattcttcaggatcaatatttttgtttagtcatcttttaaatgttttatctttattaaaattctcacattgttcttgcatgctgccactagctcattgaacatgtttctaacatttactttaaagtttctgtcaggtaatccatgttcttccttttcattgatgtcagtttatggaccttttggttgttcttctgtttggaccatgttcccctgcttcttcattttccttgactgtctttgttgttatctgttctttataacaaaagccatcatatacttcttcaaagactaggctcatagagatcaccctcaccaatcagcccagacagtaattgtgggtctctcaaaacttgataggattcaaacttctgtctgttcttagtggcccctaggttttagaggatgatagattgtgccaggactcacaggtaagggaggtagaaactatgtactcatgaccatggggtctgtgctgatctgagcttctcttgtcatcactctcaatattcaacttccccgtggatcaggctcagctgtggctgctccacgtggggctgttctcagtctgttgcctctgtgtgtgcagaagtcctctgtgaagttaactagtggagtcagacaggaaaatactacagaccaagaattctcagactgttctgcaaagcccctggattcactgaaaaaagaacaagtttggtccagcaggattcatggcaagtgttggtgagggagataacagtaattcaagtggaagttctcaatgggactcgccttcagtacaaagaagattaacagtcctcagagacactgttcagaagattctcttttaagataataaaactgagagcccaagacaagtctgtgtattactgtgagggacacagtgtggggacatctatgtgagcacagacacaaaagtccctgcagggagacaggaggggactgcatgttagttgctgctcagaaccaccagggggcattcaggacaccagtaggcactcagaaccaccaaggagagctcagaatcaccagggggcactcaggaaactggcaggtgctcagaaccaccaaggggcgctcaagatcccagcgggagctcataaccaccagggggcgctcaggacactagggggctcagaaccactagggggcgcccaggaccaccaggtctctcaagacaggagggcgcactcaggacactagggggcgctcagaaccatcagggggcaatcaggacaccagagggacttcagaaccaccagggggcgctgagaaccaccagggggtgctcaggacatgaccggccctcaggaccaccaggggatgttcagaacaccaggaagcactcaggacaccagagagcgatcagaacaccagggggcactcagatcctccagggggcactcaggacaacagggagctctcaggacaccagggtgagctcagtaaaccagtgttcgctcagaaccaccagggagcactgaggacaccaccgctcccttaggaggcagctccacatcaggtccctggatccgggcagggagggcggttccttttggatcttgccactaaccttttgggagttttcctgcttcctttgtggtttcaagaatcatttgcagattcttctcatgtacaaagctctgctttcttggattatgtaatgtttttggctttggatgctaccagaattacgttgtactgtgagaggattcattcgtggtgtgtgcaatagtgaatgaaagctccaatgttaggggtggctttgaaagctacgttaggggtggctgagggcagttagcagaaaatgatcatcactatagaaggctactcatttctttgcacatttgcataaacaattgtagtttatgccctaaaaactgcatgttttcttggccctttttcttaaatggctccactctaagtccagtaatctaattaagctgtgtttcaaagaccaccaatcaagttaattctgtttaatgcaacactttgtaaagaaaatgtacatctgttttttagagtcagctttaaattttacattactttacaaatattgatttgtcaaatttagtctcataactatcttcagtaatttaaaatcttagtcatgtcatgttaaattaagtaatcctaggtttctcacttgaattagggttactaagaattagaatagtaaaagagtataattagcttttggtgaggtttataaagaaagatgaggatttttttttttttttgcttaaaaatattctgttttccagtttacagggcttttcaactggttttaagataaccactgtttacatctaaacttttttttgtaaatgactgctgagtttctatacatattccatagctagagtttcaaagtaaaagctctagtatctttgtattagtgtgtgtatgcgtagatgtgttaatatgtgcatgtatatatatgtgtgtgtgtgtgtgtgtgtgtgtgtgtgtgtgtgtgttgtggctactaggtacaaaattggctttgaaataaatattttcaaattaagtaaatgagcccaatgcatttgaagtacatgtgacttaaataaatatttaataaataagttggctttaaaattattggtaaaaacaaattagagatattttaacaattatcagcataccttatagtttatattaattcatcaagtgattttatatttaaaatcacagctagatattatatggtgtcaaaattttttatgatgattataaaattattaacctcgttggccatatgcggtggctcacacctgtaatcccagctctttggaaggctgaggtgggtggatcacgaggtgaggagattgagaccatcctggctaacatggtgaaaccccatctctactaaaaatacaaaaagaaaaaaaaaattagctgggcatgctggcaggcgcctgtaatcccagctactctggaggctgaggcaggagaatgcttgaaccccagaggtggagcttgcagtgagctgagatcgcaccactgtactgcagcctggatgacagagcgagactccgtctcaaaaaaaaaaattataaacctcattaaaaccagaatgatctttgtaattttttgacaaatatgatgtttaatattgttgttttaataaaaaacaggtaaatagttattagaaaaacaattatttgcttaattataaggtttttactcaggcaagcacctgaaattcatgggttataacatggttaacagagaaaaaactttaaaggatgaattacaattttcataagtaatctagataagctacttaaataaaatagggaaatgtaatcaaataaaccttttaaataaacttgttctacaatttaaaaatctaaagtttaattaaataatagatattgactaaatgtttaggtcattactaattgttttaaaaaatatataagaaaatatttttcttaaaaaattattcttagaaaaataatgtaattcaaagttatttatataacatcataaaaagtaagagagttttaaagaaatttattgacatagagaagtacttttggtaagaaaggttaaaataaaaaaattttatatgagaaataatcttgcatggtaattttttatcctaaaataaaatgactaagaaagaatgacgtttagaataaaacaagatgttcaactatgccataaatggtttgtgtaagtgaaaataagatttataaaaagttaatttattaaaaaaccttcatattatcaagttgactataattgaaagggaagtatttataatagtctttatagagatctggcttttatataaaatatagtaatacactgaagactggttagaatgacaaaattgtcttaaagtgttgatttactaaataaaattataagatattttaattttttaacccccaaatttaacttttattgcatcttgccattttgattttttccctttgagaagacttgagaggctctccattttttcatcacgtcctttaacattttttttcttacagcgattagcttcttactgacttaacttctaactgttgttagcttttaactgctattattgtctgatgctaaaaacattttatctttaagttctaaataaaatgttttctttcaatataacattctacactcttggcttatctttaaatgtctacatttttctatgaaaccaaagtcttcacgtgtaatctgagtcacattcttggtatgtctaattaattcaaatgcttttttcattagagttgacctgcaggttatctacatgcattttccaatagggaaaagcaatcacactgtaaaaggttttgctttgctatttggtaactggcataaaacaaattttatattttattgaaataattcctatgttactgttattaaggtttccaacttactgagattttaagaaaatataaattaatgttattacattcatgtagctatctacattacttttaaaggccttgtgctgccacattactgacctttgactcctaggtctaaaaaggacacacagcattttgggagactaaggcaggcagatcacctgaggtcaggagtttgagaccagcctggccaacatggcgaaaccctgtctttataagaaatacaaaaattacccaggcatggtggtggatgcctgtaatcccagctacttggaagcctgaggcagggagaattgcttgaacctgggagacagagattgcagtgagccaagattgtgccactgaactccagcctgggtgatagagcaatattccatctcagaaaaaatatataaataagagaaaaaggacactaagtcctgctaaatcttaaacactgacagtaattaaagccccatctacagacctggaagaaaatgacaataaaaattcatcatactcttaagacataaggccagaaattgaaactactcaacaactccaggcccagggactattacagaagtggatttgtaagattgtaaaagctaattttgagatataatattacttgagagtttctttataagttaagcattaatattaaatgcacactaatggaagtctagcatctgggcccctgtgacagattgacaagggtttcttgaagaagtaatccactctttagcttaaaaaattattaaaatttataaaagacctatgaaaattatattttatggtaaaagtagttataatttaatagacttatttctcagaattgagagatagttttaatttttctcatgatgttcttataaggggttattgtttagaaaattaattctttcaaaaataaaagtttttgcttttttaagaaatcactgagttttcacttggctaaataaataacttactttacaataatctgtaattccattttgtaatatcaagtgttctaaataaacctttgatatttgacctccttcacaaaataaaagtctaaattcagtcatttgacctcattattcttttttgatatttgatctcctgaagccaaaaagaaacatatttagcttctttggtacaattaaattatactggaagcaatgtcaaatttgaaatggtgtttaactttggactatatttatataaatgtggactatataattggagtatattcatataaattaaagagtacatgttctaaaatggtatgaggttcaattgactttgatatgtcagtatattttgtcagtagtacttatgattattatataaaatttttgttcatcacagaaataaccaaactttctcctcaattctgtctttaaccgtggctattctaaaacttcagccatccacaattgttttcctttgattctttatcaggtggcttataataatctatagaattttgaggggtactcttaaatacacaattgtgacaattttataaattgtgccatttatatacagagaaaaacttccaagactctcatggagacctgatgcatttatgatggttgttaatataatgtcaaacaggacaggacttaattgcatgaactgaactaacaggagcctgaaataaattttatggcttattctttaaagcatttgctaattacttacattttgtttttcagaatcaaaaaaaaaattctcttaagctattcattgtttttaacaattgagtatagtatattctagtgagaaaattcaaaaacacaatttcttcttctctacataatttctccaaaatttggaaactgtgagtattgttatatcaaaatattaattcacataggttcaatataaatctgctttcttccgtaacagggcacaattggagacaatgatcattttaccaagactttaacttgaatgacatattttcatatttactttataaaatgaatttaagctggatagctgataaaagccccttgggaaaactggcatgtaacctgttttgttcagggccctgagctgtagtaagtcaataattttactttctgacagacccaggaatcccaagttgtcttggaaaattgaaaaaagaagaagtaacccaattcatatagctgtctgaaggcacagatgaaacaatgtctgggcttgatgcttttaaagattctacccttagatttcttataaaaaatttccagcaaggtcaatttatgaattaaatagcctatgtacaaaaaatagaaaaaaagagagctaatatgttaaattactatttttgcctcatcttatacaaaaaaattaagcctaaaacttatattacaaataaatttgccctactatgattgtgtctctaataactttggggaattatagagagaaatactgtttcaaaataaacaacagtgcatctgttattagattctaaccttgtccacttgtttttcaatttatattattttctacaatttatattagtttctacaatttatattagtttctataaaaatttatatttgcagaagcctccaaaatatttttcctgatttaaaattaccagaagttaaactgtgctttcttatagctagacatcttatactctaaagaaaataaaatcaatgacatgatttggctctgtgtccccaccccaatctcatcttggattgtaataattcccacatgtcaagtggaaaaaggtgggaataattgaatcatggaggctgttttctccatgctgttctcctgttattctcacaagatctgatggttgtataaggggcctccctcttcccttggcacttctctcttgcagccatgtgaagaagcacgtgtttgctaccccttccatcatgattgtaaatttcttgtggctttctcagccacgcagaactgtaagacaattaaaccttttttctttataatttacccagcctcaggtatgtccttatagcagcatgaaaacggacaaatgtaagcaacttaattatatacaaaaactcttttatacctgcctactgtgaaaggaaaataagtcttgagaccgcaaaatcaccaagctaaatggaagagtcaaactggtgttacaggagatagaaagaaattattttggtagatagttaggatgacagaatttctgccgaaaacatttcttctaacaaaaatcagcttggcaattacttattttctattcacacagagttcaaagaaatcacttctaacaaaaagcagcctgaaagatcaggctgtaaaacatataagcaactctgccacagagagggtgtttctgggtgtaatcaccaaacttcacatacatacactgggccctagtaaaaacagtgggccttaatgagcacattcctttccttttctgggggcactataacatcagaaagctggaaacttgcacaagtttaggatgcctgcacttgcaaggaggtacctgggacctagcatggaaaatcctcttcccctttttagcactctgggagtggagccccagccttgggattcccaggtgtttcccttcagtgatcaggactgaacacacacaactcatcatgcagtttgtgctgagctgggttttccttgttggtattttaaaaggtgattcatggagaactacagatgttgagtgtgagtggacatgagtgagcaaaacagtgggtttgtgtggcagtttctgaccttggtgtctctgtgtttgcaggtgtccagtgtgaggtgcagctggtggagtctgggggaggcttggtacagcctagggggtccctgagactctcctgtgcagcctctggattcaccgtcagtagcaatgagatgagctggatccgccaggctccagggaaggggctggagtgggtctcatccattagtggtggtagcacatactacgcagactccaggaagggcagattcaccatctccagagacaattccaagaacacgctgtatcttcaaatgaacaacctgagagctgagggcacggccgtgtattactgtgccagatatacacagaggggaagtcattgtgcgcccagacacaaacctccctgcaggaacgctggggggaaatcagcggcagggggcgctcaggagccactgatcagagtcagtcccggaggcaggtgcagatggaggctgatttcctgtcaggatgtgggacttcatcttcttccaacagtttctctaatgaacctccctaattttagaattctgtggttcctaatgtcatctctacatattttcaaaagatcattttaatatgaggacataacctctcatgtaccaaatgcacattgatgcttacaaagatgaaaagttctcaaccattgtcaccaggatcgcagtcctgaggaagctcacgggtgtctgatgagtctcctccattcaggcccaggacagaaacctcagggagactcctggactagaacggcagggattctgatcacagccaatagagagcctgggccagggtcagtgtcctgtagaagctcacagggttcacatctgacccttctcctgaccctaaagccaatccgcatcagcactgatctggtgctccttttgctcccaatacatgttctttctttggagtgtttgttctcccttttttatttgcttttctttcttcctgaaaaagaaacacatggtctctatgctctacactccagggctcaaggcattttcttagaactcaggcaaggctcaggcttggctactccagcccacgtgggagaggctgatgggatttccttctctccccatattctcagggccctcctctgtgttgtgtgtagactcatctgggaatgcaattggccgttaatagtgaaggggataaactcatttgatcaaaatgggatgtggatgtggaattaaccctgttctatgcacactgtcagagtcatcttcttcagaagtagtgttagaaagagcttgtgaactttatcagaatcaaaatggatccacttgtgttaaaaccctaatgaatgaagctggggaaggccatgaaggagggttctaacacacatattcctgataagaagaactatcataaatagaccctgcacagccacaaccttttacacagaggccaccacagccttaaaagctttatttctccaagtaaatctgccccgcaactgcctattcaaccttacaccgctatctcaaaatagctgctgtcaccctcctcatttttccttaattctcttttttattattttttaaattatactttaagttctagggtacatgtgcacaaagtgcaggtttgttacatatgtatacatgtgccatgttggtttgctgcccccattaactcatcatttacattaggtatttctcctaatgctgtccatcccccttcccccaaccccactacaggccccggtgtgtgatgtttcccaccctgtgtccacatgttctccttaattctttatcttccttttcctacctgaatgtacccatacatattttaattgaaacgcacatcctagaaaaaatattattatactttagagtctctgtctgttattcaggttgacatgacaagctacagacggacatgccacttttctgtgagacatagaggatgacagtttttggagatgtctaggaatatccaatgtccataagatcagccatcaataagtgcagactggaggtcccagagagaggcgaagctgctgaatcatcgtggaatttcattttctccagttctgctctgatggaatcaggcccacccattttatcaatgacaatctacctaacctagagtcagctgatgacagtattaatatcatctattaagtaaagtcataactatatatatagtgagagagggagagagagagagacggagtctcgctctgtcacccagggtggagtgcaatgtcgtgatcttggctcactgcaacctctgtctccggagttcgagcagttctcctgtctcagcctcctcccagtatctgggaatacaggcacacaccaccatgtccggccaatttttgtatttttagtagagatggtgtttcaccacattggtcaggctggtctcaaactactgacctcaggtgacccacctgccttagcctcccaaagtgctgggattacaggggcaggccaccaagtccagctaatttttgtatttttagtagagaccaggtttcacgatattggtcaggctggtctcaaactcctgatctcagcctcccaaagtgctgggattaaagatgtgagctactgtgcccggccaacaccacctatattaatgttggattgaataactacaaagtctaccctaaccaagtgtaccatcaaacttaccattacccagaggaaagaatctttaacatgagatctatattcttaaatgttttaaggtgtaaaactgaccacagtacaatcacccaattatgattttgctaatgagttgtagaaactgcatgtatattttggatattaacactttttcagatgcacaccttataattatattctctcattctgtaggttgcaattttttccacactttgcggcatctttttgttgtgatgtagttctgcttgttcaattctgcttttattatctgtgactttaatttgaaatatagaaaatcatccttttttatatactttaaattttagagtacatgtgcacaacatgcaggtttgttacatatgtatacatgtgccatgttggtgtgctgcacccagtaacttgtcatttaacactaggtatatctcctaatgctatccctctcccctccccccaacccacaacaggccccggtgtgtgatgttccacttactgtgtccatgtgttctcattgttcaattcccacctatgagtgagaacatgcggtgtttggttttttgtccttgtgatagacttctgagaatgatgatttccagcttcatccatgtccctacaaagggcatgatctcatcattttttatggctgcatagtattccatggtgtatatgtgccacattttcctaatccagtctatcattgttggacatttgggttggttccaagtctttgctattgtgaatagtgccgcaataaacatacgtgtgcatgtgtctttacagcagcatgatttataatcctttgggtatatacccagtaatgggatggctgggtcaaatggtatttctagttctagatccctgaggaatcgccacactgccttccacaatagttgaactagtttacagtcccaccaacagtgtaaaactgttcctatttctccacatcctctccagcacctgttgtttcctgactttttaatgattgccattctaactggtgtgagatggtatctcattgttgttttgatttgcatttctctgatgaccagtgatgatgagcattttttcacgtgtcttttggctgcataaatgtcttcttttgagaagtgcctgttcatatccttcgcccactttttgatggggttgtttgcttttttcttgtaaatttgtttgagttcattgtagattctggacattagccctttgtcagatgagtagattgcaaaaattttgtcctattctgtaggttgcctgttcactctgatggtagtttcttttgctgtgcagaagctctttggttcaacatactcaaatcaataaacaaaatccagcatataaacagaaccaatgacaaaaatcatatgattatctcaatagatgcagaaaaggcctttgacaaaattcaacaaccttcatgctaaaaactctcaaaaaattaggtattgatgggacgtatcttaaaataataagagctatctatgacaaacccacagccaatatcatactgaatggacaaaaactggaagcattccctttgaaaactggcacaagaaagggttgccctctctcaccactcctattcaacatagtgttggaagttctggccagggcaatgagacagtagaaggaaataaagggtattcaattaggaaaagaagaagtcatattgtccctgtttgcagatgacatgattttatatctagaaaaccccattgtctcagcccaaaatctccttaagctgataggcaacttcagcatagtctcaggatacaaaatcaatgtgcaaaaatcacaagcattcttacacaccaatcacagacaaacagccaaatcatgagtgaactcccattcacaagtgcttcaaagagaataaaatacctaggaatccaacttacaagggatgtgaaggacctcttcaaggagaactacaaaccactgctcaatgaaataaaagaggataaaaacaaatggaagaatattccatgctcatgggtaggaagaatcaatatcgtgaaaatggccatactgcccaaggtaatttatagattcaatgccatccccatcaagctaccaatgactttcttcacagaattggaaaaacctactttaaagttcatatggaatcaaaaagagcccgtattgccaagtcaatcctaagccaaaagaacaaagctggaggcatcacgctacctgatttcaaactataccacaacgctacagtaaccaaaacagcatggtaccggtaccaaaacagagatatagaccaatgaaacagaacagagccctcagaaataatgccgcctatctacaaccatatgatctttgacaaacctgacaaaaacaataaatggggaaaggattccctatttaataaatggtgctgggaaaactggctagccatatgtagaaagctgaaactggatcccttccttacaccttatacaaaaattaattcaagatggattaaagacttacgtgttagacctaaaaccataaaaaccctagaagaaaacctaggcaataccattcaggacataggcatgggcaaggacttcatgtctaaaacacgaaaatcaagggcaacaaaagcccaaattgacaaatgcgatctaatatgaaattcttaatgagttctatagttataagtacattatttctccttattaaaactaatcttttttgctgaatgggtggaagatggtggcttccctccaaaagaaaacatagttggttctgtaaagagttcacccatttcttccactataggcctgccctggcataatacaagctcccaacttaagaacttatgattttccatccatgggagaagccatcttttccatctattataaaaacagaagacacttcattaatatcactcccaaaataggctatgtcatatccagtgaggtaggatggctgacagtggtgagaatccaagtaattggtcaagcactgctatgtgtgaagaaacaccacagcatactctacactgtcactcatgatatggaattgttgcctcctcagcaatgtaactgagcccttaatatgtggctgggatgacaaagcaatgccagcctgcagagtggaacctgttcttccttctgggattagccaaaggccggtggcactcatggctgaccctactttccttacaactggacgaagcgaagcaactggatatgaacttctatcccaggatgtaactgtccaaagtgccttctctttatgtcaactggaaaagtgtgaaagacagacactattctcataaacggatatcctagttattccacccactagccagctcttccccccaggtggcagtcatagatttagaattgcaagtagaggccctggctaagcataccaccagtccctttaacaacacctaccataccatcatcattcttactgaagaaacctcacagatttgacaagtgacactatgaagctatatgaccctaggtattgcaactacagccaaaggtaacacttgtgtattaatgaaccctgaatgttgcatatatatacaagattagtcccacaatataactcaagctatgcaagcattagatacccatatttctgctagagatggatgccctctctcaggaccctgcgacagcatggtttagttgacttcctaacacatggaagactttcatatatagtagagctggtatactcttcattgctatcttcagttgctgtggattttattggtaccttgcactttaagtgagaatgtaatactgaccttctcaaaaactcctaggtccttgcaccataatgctccaacaaacacctactgtaattccggagactccagaatatttccaactccagtttaatggattcccttccaatatatacaagctatgccctttctaagaagtagccagattgactatgacacacgttttccatagaaacaaaatggaatttgacagtggggaatgatatacaggcagcttaatttcaaaatgcattttaaacttattttttgaggttttaatattattttcatactccttgaaacctgaaatttcacacttacattctaattgagacttaataacaaataaccagaacacatgaattgcctgtaatctctataccttgtattgtaagccacatttcaagtgtaaccttacttgtcagcacagtatgtttaccataggcataattgcttgtcctgactgtccagaaggcagggtggtattaagtatgcggcctctggagctgggaagtctggctttgtatactgtctctgccactgctaactgaaggacaatgggccagttacttcctgtaccccagttttgtcatatgtaaagtagggttgttgtaagaatgaaattagttaatatttagtacctaacaactagtaggcattacgtggtagctattcgtattgctatcgtcagagaacacacaggagtccattgttatttttaccctccccctccaaacaaaatgtgtaagacactagacatggtagctctgtaacggggttcgtcatgtattaaactgtgtacccaaatgatatgtcaaagtcctgacaaccagcacttcagaacacgtccttatttggaaatatggtagctggagatgttattagtgaagatgaggtcttacttgagcagggcaggccctcaatgtgggaagatgggtgtctttctaagtacaaggaaatttggacacagagacagagacatacagtgtgccatatgacagcagaggcaaagatcagagtggtgcagcagtaaaccaatgcatgtccaggattaccagtcacctccacaagtgaggaaagggcaaggaagaagtctcctgagtctcagagggagtgcagcccagctcacacttgattttggacttctagtctctagaactgtgagacaatacagtcctgtcatttttaagccacccagtttgtagtatttcattttggcagccctacgatattcatacagagttcttcacccaaaaggaagcactctttctcacaaacagtcaaagtcctggatgacggacaacctggagattgcaaacctccaaggaatcaaaggaggttctataaagtctaggagccccatctttcaaaggctgctcctcaagtccacacacacactttggaaggagaatcctgctcttggacatgggatccttagtgagccaactgccaataatccaacatcatcatgaattaaagatctctgacatttcctcgtcaccaacgggaattctgtcaagtagtaagtaaaacccttcttcaggaatctccacaccaaacagttctgcatggcttgggacgcctcaggaaacttataatcatggcagaagaaaaaggggaagcaaggcagtcatacatggtggcagaagagagaggttaaacttttcagtctctcttgggtgtaaagatacaatcttgaggcaaacagcagaatcaattttcttatgccttgaaattctccctttcaccataaatattcccttcacattaatctaactttatgtttgcatcgaactatgtgcctttttggaagttccggaagctaatttgagacagatagacaaagtcgggagaccctgatgcagaattccagaggtgacttcaatgttgctagttaacaacccaggcattgcccagatgatgccagcccaagatccaggtggactgggatgccagagagctgccagaacaagacgcacagacctggttctcagcccaaatcttgcatgcctttcttaccaactttcccttttttaaacccctgcctttccttcaaaattgaagtggttgcttgggatgggaatgcgttcacttcccctttaccattatggttaatacaataatttttgtaccagatctctctcttgttaattggatcctgcaggtggcagattccggaccagagtgacgttagaaactgaatgcacatactgggtggttcacagacacagtgttctgtgaagtttatgggtggattcctggggaagcctgcaagcctgttagtgattagcagaaccgcatccagctactgggatctgcacgccaggtgccgtgagcccctcaccatgttccctggtcccagctgcccgcggatggttcagccttgacaacgggctcggtgttctgggtggtgggagagcaagggggccccttgggcagcgtgctacagggctgtgaatccaggggcccacccggtgttccctgtggagtcactgagggaatgaggggcttctcagggcacagagctgtaacgcctttgtgcagtggtggctgaatacagtgacactgggcgcgtggtgagaagcggggcaaggtcagttcactggaccctccgccctgagcctcagatgagtcgggggtccccagacaggcccggcctctgccctgcggcggacactggagcctttgctgtggccgccaccgaggagccttgacctcaaaggagggggaacctctctacccacctcggaaacctgaagggagcggcggtctctcccagacaggatctcgccggcctccgcgtctccaggcccaaccctgtaccacataaaggaagtccgcgctgagctaccgggacacagcgccgttgggtgggcgggcgcggcgcggcgggaagcaccggggcagctgccacagagatgcgcggggactgtcgggaagtgggcggtccgggaggcgcggggctgatgggacgtgggcggtccggggacgcgcgggggatggcgggacgtcggcgatcccgagatgccagggggcagctgggacgtgggcggtctggagaggcgcgggggcagctgagatgcaggtggtccgggacgcgcgggggctggcgggttgtgggaggtccagggatgcgagggggcagctgggacgtgggagttccggggacgcgtggggtcgccaggaagcggggtctaggacttagatccgccttctcttcaggccatgcagccccgaagctccgaatcctgggatgactcctgtccatgttggaagggaccctgccagtcctggcaaggttcaacggccttagggcaagaaatgttagtagagtcctggaagacgatgtggggaacgggtagcggccaccggatggtgatcgttcttctacaagaccttgacatggatggggagaaacagagaagaaccttccaagtttgtcccactggacatgcccaccacactttaccagccctttctagaaggcctgtgcgtaacacatgaaaaagctgctctcgacctttccctgaccttttaaaagaaaacatttgctgcatctaatccgcctagatgtaaggaggttcccaaatgtatgacagagtcagacaattacatgtcttgtaagttaccatgtgcttgtcttttgttttccgttttttttcgtttttttgttttttgtttttgagacggagtctcactctgtcgcccaggctggagtgcagtggcaggatcttggctcactgcaacctctgcttcctgagtttcaacaattgtgctgcctcagcctcccgagtagcttggattacaagtgtgcaccaccacgcctggctaatttttgtagtttttagtagagatggggttttgccacgttggccaggctggtcttgaactcctgacctcaggtgagccacccaccttggcctctcaaagtgctgggattacaggtgtgagccaccgtgcctggccgtaagttaccgtgtgctttttaaacaaatcatagcaaaggggtgtcttctggaaatgacattttgaaatggagttactagaccacccctggaagggacacagtaaccacacgtccacgttcgttcagtgggtgagaggacatggaggggagacctgggcaggaagggaagagggttccatgccaggctgctcatatttaaaagacattttcattgtagggacatggatgaaattggaaaccatcattctcagtaaactatcgcaagaacaaaaaaccaaacaccgcatattctcactcataggtgggaattgaacaatgagatgacatggacacaggaaggggaatatcacactctggggactgtggtggggtggggggaggggggagggatagcattgggagatatacctaatgctagacgatgcgttagtgggtgcagcacaccagcatggcacatgtatacatatgtaactaacctgcacaatgtgcacatgtaccctaaaacttaaagtataattaaaaaaaaaaaagaaaaataaaagacattttcatatcgttgtcattgttttcttgtgtgcattttattcctcgctattgtatacatcattggaaattctaagtattcttttgaaatatctagtctttctagatgttctgaagtgcctgatgtatgttaaaattacaggtggtaaaataataaattttgtaaatgtctttttgttaaaattcatatgcagtgttttattttattttgatgttggtggggggtggggaggatggccaaatccctgcttgatcaacacacattgcgtttgtgctctggttcaggggaggagagaggaggagaaagtgcagacttccaggcctctgtgcgcaccgggaggagagattaatgatcatctcttctgtctgtgtgtttgttttatttatctatggatatcctgtgtataaaggatgaacaagtcctatttataacatctaatcttttcaggtgttaagttgccagcgtatgacggaagtagcattattaaacgaatgcagcttgtacatattgtgttaaaattcataaaaagccagtcttctgaaaagaacccttgggccctccctccgcagcctccggcgccagctgcaggaagacctggccaggggaaggcgggcggcagaagctgctgctggctgtggggaaggcggtggagcccaggcctccacaggctccccacaggctccccacaggctcgcgcggctctggttgctgggctccgcacgggccgcgtgggggcgcctgctgggagcgaggaggcgccatcctggctcgcctgctccaggaggacgctctgggcctgcgcagatgcagttctccaggatgggcgcgggcgctgggggcggcgctccttgggctgctgcgcctccactgagccgcctgggtgtgaggacctcgcgccggcgcctccgggaaggacgcggagccgccgcggccgatcccagggctgcagctgctgcccgacgcccgcgggaaggcccttccgccaccgcccgggggttcgaacttggagcagctgctgccagctgaggcgccagcggcgtcgggagctcctcagagtcagtgttttgtgctggattcggcatgtcctctgaaaactcgggaatttgtcactgaaatggtgacaggaggtgagaagtttttttagacgttgccttcgctggcctggcgcggggctcaggcctggaatcccagcactttgggaggctgaggcgggcggatcgcttgagctccggaggtggagaagctgccttcgtggtaactgtggtcttaagttcagctgagaacgataaatggcttttccttgaattggctgcttttgtgatttctctcaggctcatcttttgtcagttaaaaatccagtggtaggtgtagcttagagacgggaaatttttggttttgttttggctacacgtaagtgttggaaattattttcttttacgttccagtgtgagcaaatccagaaggatgtcagattaaacaccgaatttaacaaattcagccgggcacggtggctcacgcctgtaatcccagcactttgagaggccgaggcgggtggatgatgaggtcaggagtttgagaacagcctgaccaacatagtgaaactccgtctctactaaaaatacaaaaattagccgggcgtggttgtgcgcgcctgtaatcccagctactcaggaggctgaggcaggagaatcgccgagattgcgccactgcactcagcctgggcgacagagcgagacttcgtctcaaaaaaacaaaaaaaaatcaatcattggaatactgttgttcattacaattaatgaacgtttgatagacgcataaacgaactaaattcacaagtacatataagtaaaataagccaaaaaaaaaaaactacatcccgtatgatgacacttttatacattctacagaatagaaactaaagtgatatgaaggttgggagttgaatggagaaaaggtgagcgaaaagagggaggacggaggagttgcaagagaacaagagaaaatgttgagggtaattgatctgttttctatcttaataatggttatggttacatcaataatttctaaattgtacattttgtgtgttaattataattttatattattcaagctattacaaataaatacctgtataaatttcttagggacggtttaagggagatggataaatcacataaaaagtcagatatttctgaatgtacaatgaataacccttagctctatctttattttttggtaattctaaaatgcagcagatttttttaatgtttttattacaagaagggtttcttcaaaccacaccaggtgtgtgtaactctgggctaaagttggttaagggagcagtgggatccggtggagaggagcacaggcctcgatcctggagcccattcttgtcacatgtgagctcctggacacatctcatagctccctcatgcttctgcgtttacattctcatctgtaaatggaggaccaatgggcatctgcctctaacaatgtattttcatgtgttaagatgatgtatgttaagtgtttactatagcacaatcttttaataagaaattacatttttttccaaatactatcattgtcttcaagccccaccacccaccagaaaacttaatatgctctgtgccctgccctgtcctcagacatccagcccaagagacttttatatagtaggagatatgcaaatagttccctccctctgctgatgatgaaaaccagcccagccgtgaccgtgcagctctgggagacgagctcaagtgccaggattcccaagtgttttcacttggtgatcagaacttaacacagaggaatcaccatgttgtttgggctgagctgggctttcctttttactattttaagaggtgatacatgaagaactacagatattgttcgtgagtggatattagagaaacagtggatatgtgtggcagtttctgaccaggatgtctctgtgtttgcaggtgtgcagtatgaggtgcagctggtagagtctgggggagacttggtacagctgtggtggggttgggggtgtcctgagactctcatgtgcagcctgcggattcatcttgagaagcaatgacatgaactgggcccaccgggcttcaagaaaggggctggaatgggtctcatacattagtgctagtggtggtagcctatactatgcagacactgaagggtagattcaccatctctagagacaatggcaagaacatgctgtacttgcaaatgaacagtctgagagatgaggactcggctgtgtgagagacatggtgaggggaaatcagtatgagcccagccagaaacctccctgcaggaaccctggggtggggggaaatcagctgcagggggcactcaggacccactgatcagaatcaaccccagaaggaggtgcacatggagattaggggctggattccttccaggatgtgggacttcaacttcttctgacagtttccccagggaaccgctctaagtttagaattctgtgtcatctctatgtatttaaaaaagatcattttaatgtgaggaactaactattctcacatgcacaaaatgcagattcacactcacagagatgaaaagtcctcaactgtggtcactaggatcagagtcctgaggaatctcaggcgttcctggtgagtcttctccaatcagacccaggacagacacctcagtgagattccatgactagaacaggctttatggattttaaaaaaaatagactgagccagggtcagtgtcatgtagaacctcacaggtttcacatctgacccttctcctgacactaaagtgtgcaaatcagcatcaatactgatctggtgctgcttttgctcccaatctgtgttctttcttgagttgtccctttttcatttgcttttcctgctccctgaaaaaagaaagatgttgtctctgtggtctaaattccagggctcaagcccttttcttggagctcaggtgggtctcaggttgtggctcctgcagccacgctggggaggctgatgggactttcttctctcccattgctcagggccctccactatattgtgtggagactcatctcagaatagatgtggccagtgggagctgaaggggacaagcttgtttggtcaaaatgagatacaaatatggaattcaccctgtgctgtacaaactgtcacagagtcactttctgaaacaatagtgttagaaagaacttgagaaagttgtcagaatcaaaattgggtcacttgtgttaaaactctgctgaatgaagctgggaaaggccgtgacggaatgttctcatgctcatatccctgataccaagaactatcgtaaatagactcttaaaaccacaatcttgcacaaaggtgcccacaaccttaaaagaattacttctctgagtaatcttcccagcagctctctgtgtaagattggactgatgccacccttgttattgattcttctatcccggagaagttgtctcaaaacagcttatgtaaccctcctcatttttctttaaacctttatctttctttacctgcctgagtgaacccatgcatgttcccattgcaatgtccatcttcaaataattatcattttactttagagtctctttttgtctgttattcagatttgacaagctgcagatggacacatcacgtttctgtaagacttaggggatgacagttttgaggcatggctggggaagtacaatgtccataagattgaccctcaataagtgcaggctgtaagtctcagagctgaagctgctgaatcaccatagaatttcatctttagttctgctctgatggaatcaggcccacctgtgtaatgaatgacactctacctaacctagagtcaactgatgacaggttaaatatctagacagcaaatttgcaacaccacttagattagtgtttgaataactacaaagtatagccgagccaagtatatcgtaaagcagactattatacatggagaatctttaacatgacatctacaattcttaattttttttacgtataaaactgatggttttacaatcaggctgtcatgattttgctaatgagttgtagaagttacatgtatgttttaaatattaacagttttttcagatgcctggtttgcaactatattctcccattctgtagatttggaattttttccatgctttgcaaaatctttatattttgatgtagttccagtccttcaattctgcttttgttgtctgtgcttttaatcttaaatttaggaaatcattgctaaccttttggtgggagagaattttacaattgcaggctatacatttaactgtttaacccatctagagttgattttttgtgtttattctaacctaatattcttaactatttgcaagtgaaaacccagtttgtttaacaccctctttaggggagagtatgatttagccgttgtgtagaaaatgttataaatcactttgccttcatattggttctcaacttgaaaatgagtttgccatcaatacgtgggtttatttctgagctctctatatgtatttatgccagtaccatcctgttttgattatgtttgtaattaattttgaagtctgagagtaaaatgcctccaagtttattcttgcccttttgcagatattagacaaaatattttaacatttcaccatgaagtatgataacagctatggcttttcataatgaattttattgtgtttaggttattttcttgtatttctattttgggtagagtttttatggtgaaaccttgaatttttttaatgttattttctgtctgagaagttaatgggaccttcttcgtatttaatttggcataccaaatgtattgatttgaggattttgaatcatctgtgcatctcaaaaataaatttgagttggtcatggtgtatgatccttctaaagtcctgtggaacttagttgactattatttggtgtgtggagggggctcatttatgtctactaggaatattggtctgtagtttacttttttgtgaccttgtctattactgaaaatacggtaatttgggccttatagaaagactggaaggttggcatctcaccaatttttgaaaaagttagagaatggttggcattacttctttaaatgttgagagtcctttttttacttaacatgtgacctatcatggagaatatttagtctttgcttcggaagcatacatattacactgctcttggttggaaggttctgtagatgtctattaggtcaatttgttcaatagtgttgttcaagtccactgtcttcttaagaattctcttaatgatgttctatccatcattgaaagtgaggtgctaaagtcttctcctaatttttattattttctatttatctctccatatctcttaaggtttgcttaatgcagttatatttatttttgtacaaatatgtaaaaaataaatgaaataataattgctaagtaattttaatggcaaaatcacataataagaaattatattttcccaaatgctgtcattgacactaagctcctccaggaatctcacatctgctctggacacggctctcctggtgtcctaccccagagcttgctatagaggaggagacatgcaaatagggccctcactgtcctgatgaaaaccagccttgcctgcgtctacgggagaagagccccagtccagaagtaccaggggtttccatttggtggtcaggtctctgaacacagaggactcactatggagtttgggctgagctgggttttccttgttgctaatgtaaaaggtgactcatggagaactagagatattgagtgtgagtggacacaagtgagagaaacagtggatatgtgtggcaggttctgaccagggtgtctgtgtgtgtttgcaggtgtccagtgtgaggtgcagctggtggagtctttgggaggcttgttatagcctgggggtccctgagactttcttttgcagcctctggattcacctttagtacctttattaggtactggatgagctgggtccatcaggctcctgggaaagggctggagtaggtctcatttatgagttgttgtgtaggtagcacaagctatgcagactctgtgaagggtcgattcaccctctccagagatgatgccaagaaatcactgtatctgcaaatgaacagcgtcagagccgaggataggtctgtgtattactgtggtggcattgtgtgcatcccttgtttaggtacatgcagagatgctgctttggtgtgttcaggggctcctgttttggggacaccaattttggagtttgcagtatccttgagtccagtacgttcatggtggcattgggtctggggtgtgcagtggcaatgagtccaggatacatgcagctgatgccgtatcttgtgaggacaagaacaactacaaaacgatcctattaataaataggcaaatgacttgaatacacatttttcaaaaaatacatacaaatgacatatagatatataaaatgttaaatatgagtaataatttttaaaattcaaatgtaatctacaataaattatcaccccatacctgttagaatagctatttttaaagaagatgaaagataaccagtattggggcagaagtggagtaaagggagcctatatatattgttactgaaaatgtcaattagtacagacattatggagaatactatggaggttcctcaaaaaataaaaatagaactaccatagtttccaacaagcccactactggctatgtatccacaggaagtgcaatcagtatgtcaaagagacatctgtgcccccacgttcattgcaggaatatttatgatagtaatgatgtgggaacatcctaaattaccataaatggatgaattactaaagaaaatgtagtatgtacccaatggagtaatgttcatcctaaaataagaagggaatcctgcatttgcaacagcaggcatgactctagaggaccatatgtgaagttccacaggcaggcgcagaagacgagtaattcgcgatttcactgtagtttgtttaaatggtagactcacagaagtagagtggagtgttggttaccaggggctggaggggtggactggaaaaggcgagattttggtcaaagggtgaaatgttccagttagacagaaggagaaagttacagtgttctaatgcacaagatggaaaatatggctaataatgcattatatatttcaaaatggctaaaaatgcaaatgttaaaaattttctcactaagaaatgatacagcctgggcgcggtggctcacacctgtaatcccggcactttgggaggctgaggcgggcgaatcacaaggtttggagttcaagaccagcctggccagatggcaaaaccccgtctccactaaaaacacaaaaaatagccaggtgtggtggcacgcggttgtaatgccagctactcgggaggctgatgcaggagaattgcttgaacccgggagacagaggttgcagtgagctgagatcatgccactgcactccagcctgggtgacagtgagactccaactcaaaaaaaaaaaaaaagaatgaaatgatagctgtgtgaggtgatggatatgtcaaatagcttgattaacaattccataatatatacatgtatcatagcatgtgtgaggtgacctgtatgaaggtgaagtgacctgggggctgtgtaagattacctgggggtatgtgtgaggtgaacacggcacatatgaggtgaccagagacacatgtgaggggacatgggagatatgtcgggtaagccagggggatttgtgaggtgacacagagcaagtgtgaggtgacgtggatgcatgtaaggtgatttggggcacatgtgaggtgacgtgggggatatgtgtgagctgacctcgggtgagtgtgaggtgatccaggatggatgtgaggtgacctgggggtgtgtgtgaggtgacttgggcacatgtcaggtgacatcggggattggtggtgatgtgggtgtgtgtgaggtgacctaaggaggtatgaggtcacctggggcatctgtggggacctggaaatgtgtgaggtgggtacaggtgaagtcacctagggcacatgtgaggtgacctgtggaatgtgtatggtgacctgggaccgtttgaggtgacatggggaatgcgtgaggtgacctggggcatgtgtgaggtgacaaagggcatgtgtgcagtgacctgggtgcatgtgaggtgacctggtgcatgtgttaggttacctgggggatgtgtgaggtgaacaggggcaggtgtgaagtgcctgaggaatgtgtgaggtgaactggtgcatgtatgtggtgacctgggggatttacgaggtgacctgcgggatgtgtgaggtgaccttgggtgagcgtgaggtgacctgacgtatgtatgaggtgaccagggtgtgtctgaggtgatgtggggtatatgtgcggtgacctggtggatgtgtgaggtgacctgcaggatgtgtaaggtgacactggggatgtgtgaggtgactcagggcacatgtgaggtgaaattggggatgcgtgaggtgattcagggcatatgtgaggtgaccttggggatgtgtgaggtcaccttgggtgagtgtgtggtcatctgggatatttcccaacttcgtaaggaaagcctgcaacaacacatggcattagaagcttcacactctagcaccattaatgcgtacatcctcaaggaactctaaatgttttgaggttagcttaaatgccatggagcggcaccttccccaggcacactcatatatgcatcctgggtctccctgccaagctatatctcctcaaatttacagtttatgtttgctctgtgacatcaactctgatatgttcaagtgtgtttttttttctttatttgtagttgttcaggcttgttgtttcactctcattactctgggctcagtcctctcctcaggtgtcccacttcagagctcgctgtgaaataggagacatgcaaatagggccccccctttcctgataaaaagcagcccagtcctgaccctgcagccctgggagagaagcaccagccctgggattctcaggtgtttccactttgtcatcagcaacaaacaaattaccatggaatttgggctgagctgggtttttcttgctgctattttaaaaggtgattcatgaagaactaaggatattgagtgagtggacatgagtgagagaaacagtggatttgtgtggcagtttctgaccagggtgtctctgtgtttgcaggtgtccagtgtgaggtgcagctggtggagtctgggggaggcttggtacagcctgggggatccctgagactctcctgtgcagcctctggattcaccttcagtaacagtgacatgaactgggtccatcaggctccaggaaaggggctggagtgggtatcgggtgttagttggaatggcagtaggacgcactatgcagactctgtgaagggccgattcatcatctccagagacaattccaggaacaccctgtatctgcaaacgaatagcctgagggccgaggacacggctgtgtattactgtgtgagaaacactgtgagaggtcggaagtgtgagcccagacacaaacctcctgcaggaacgttgggggaaatcagctgcagggggcgctcaggacccactcatcagagtcaaccccagagcaggtgcacatggaggctggggtttgtttcctgtcaggatttgggacttcctctgcttctgacagtttctctagggaaactctttaattttagatttctgtgcccaccaatgtcatctctacatttttttaatcattgtatatgaggactcgttctcacatgcacaatatgtatattgccacctatgggaatgaaaggtcctcaaccatggtcaccagcatcagagtcgtgaggaagctcaggggtgcctggtgagtcttctccagtcagactcaggacagtaacctcaaggggattcccttgtgagaactcacacattttcatgagaacagcaccaggagtcagttctaaaccattcatgaaagacccactccatgacccagtcacctcccaccaggtcaccccttcacaactggggattataatacaacatgagatttggggcaggacacaaatccaaaccatatcagatacacattgtgaaatacgcatggtggtcaggtaatttgtatttctatcacctcacagcgctaccattttattattttttttaatttactgcatgagtgagtgtctgatgagaacacctaagatctaccctttcagcaacaatcatttttacaatacagtattaactataggaccattgctgtacgttagatctccagaactcatccaacctgcacaactgaaactctgtacaatttaacacacatcacccaatttccctcacctcccaggtcctgggacccactattctactctctgctttcaagagcttgaatattttagatcccacatgtaaatgagatcatgcagcatttgtctttctgcatctggcttattcaactcagcatcatgtcctccaggcccatccgtgttgttgcaaatgtcagaatttccctcttttcaaagccaaacaaaatacagatgtatgtatacacattttctttatacattcatccatttacagtcattaaattattttacaaatctacactattattaataatcttgcaatgaacatgtctttggcaaagtaattttatttcctttgcatatataacaagaagtgggatcaccagattatatgatagctttatttttaacttatcaagtaaccaatcctaccacaggatatttccctttcccccacattcttgccaacatttgtcatctgttacatttctgataatagccatattaactagtgtgagttgatattgcattgtgcttctcatttgaattcctctgataattaggaatgttgagaactttttcgttttctgtttgccatgcatgtatcttctgaaaaaaattatccaggtttttgcccttttttatcagttcatttgttatttgctgttgaggtgtatgggttatttatacatttggacagaacttcttgtcagatccataattgcacatagtttttcctgtgctttgttattaaattcaaagaaatcagttccgaattaatggcaggaattttttttgctccatgtcatttatgagtttatggcttcaggtattatgtccatttttagttgattttttttttttttgggagacggagtcttgctctgtagcccaggctggagtgcagtggcgcgatctcggctcactgcaagctccgcctcccgagttcacgccattctcctgcctcagcctccgagtagctgggactacaggcgctggccaccgcgcctagctaatttttttttgtatttttagtagagacggggtttcactgtggtctccatctcctgacctcgtgatccgcccgcctcggcctcccaaagtgctgggattacaggcgtgagccaccgcgcgcggcctattagttgatttttttatatggagttagagaaggcctaattttatttcttttgcatatgaatgccagttttacaccattattgaaaagactgtcctttctctactgtgtgctcttggcacacaaaatcaggagagacataatgacaaaaaaaatatgagatcaatagtcctgatgaacatagacctgaaagtcctcaacaaaataccatcaaattgaatccagaagcactttaaaatgtgatacatcatggtcaggtgggctttacccctgggatgcaaggctcgttcaatatccacagtaactctgattcacaatgtaaacagaataaaagcaaaaagcatatgattatgtcaatagatgctgagaaagcttccgataggatctaacatctactcatgataaaaaccctcaacagactagacatcaaagaaacatacttcagaataagagccatctacaacaaacccacagttaacatcatactaaatgagccaattaaaacacttatctttataaatgacccagtctcgggtgtttctttacagtgcgagaatggactaagacagcatccaaataggaaaggaagtcaatccgtccatcttcactgatgatataattctatatctagaaaatcctaaaaactctgccaaaataattctagaataaacaactttagtaaagtgtcaggatacaaaatcaatggacaaaaattaccagcatttctataagccaaccacatccgagctgagagtataatcaagaacacaatcctattcgacttacagtatccacaaagaaaatgaaatgcccgggaatacagataacaaagtgaaagatccctacaaggagaactatgaaacacagcatacataaatcataaatgatacaaataaatgggaaaacatttcatgctcatggattggaagaatcaatattgtaaacattgtcataatgcccaaaggaattcagattcaatgctatttacataaaactatcatcatcattcttcacagaatcagaaaaaaatctattctaaaatttatatggaaccaaaaaagaccctgaatatccaaagcaatcctaaggaaaaagaataatgccagaggcatcatgatactgaccttaaactacaccataacgtcttgctaacaaaaacagcctgtactggtacgaaagcagacctgcaggaaaaaaaatagatcaaaatagaagacagaaataaagttgcacacctgcaaccctttgatctttgacaaagctgacaaaaacaagcaatggaaaaaaaaaactctgtgttcagtaaatggttctgggataactggattctggcaggtatgcaaaatgcaagagtgaaggagcctgtgcagcttctacctagatttcagatgtgtagagagccctgcatgcccaggaagaagcctgctgcaggagtggatccaccacagaaagcctctactagagcagtgccaaagatggggaaagatggagttggagcccccattcagagtccccactagggcacttcatagtaaagttgtgggaatgtggccacaaccctcaagaccccagaatggtagagctacgggcagcttgcaccctcagcctagaaaagcttccagcacttgactctcacttgtgaaggcagccccgtggtctgtgcctagcaaacctatagggattggctgcctgaggttttggggacccaatccttgttccagtgtgccctggttgaagtacataaagtcaagagagattattttgtagcgttaggatttaatatctgcagtgctgggttttatatgtgtgtggggcctgttggttgttcctttggccaatttatccctttgggattggaattatttacccaatgcctgcatcatcattgcaccttggaagtaaacaacttttattttttaaatttgcaagctcacagctggagggacattgccttaagactcagatgagactttgaaaatttgagttggacgttgatgaagttaagattttgggcactattgaaaaaaggtgattatattttgcaatgtaagaagaatatgagaactttgggtccgagagtgcaatgatataatttaggggttttcccctccaaatatcatggtgaaatgtgacccacaatgttggaggtggggccaactgggtggtttgggtcatggggaaagatttttcaggactggcttggcatccaccccatggtaattagtgaattcttgctgtattagctactgtgagatctgattgttcaaaagagtcttgcaatcctgctaccctctcatgtaacccctcctcacaatatgacacagccttctccccctttgccttccaccatgactgtaagcttcctgaggccctcacaagaagcagatgctggtgccatgcttctcacacaacctgcagatctgtaagccaaataagcctcttgtctttgtaaatcacttggcctcaggtattaatttatagcagtgtaaaatagactaatacactgcccaaagcaatatacagagtccatgcaatttctatcaagtaactaattaattatgtatttttaaaaatcctaaaatttatatagaaccgaaaaacactctgaatagcaaaagcagtcctaaccaaaacgaacaaagctggaagtaccacattccctgacttcaaattacacagcacaaagataataagaaaggcagcatggtagtggtagaaaaaaaatcaagagcccagatatatagccaaatatctacaaccaacagttctttgacaaaactgacaaaaatatacactggagaaacaaccctctattcaataagtagtgctgggagaattagatagccttatgtagaagaataaaatgagacttctgtatcatcatagacacaaattaactgtgaatatggattcaatgtttataaactcataaaaatacttgaaaaaatctaaaaataatcctctggacattggcctaagcaaataaaatatgactaagacttcaaaagcaaatgcaatgaaaacaaaattagacaaacaggattaattgaaccaaagatcatctacacatcaaaagaaagaaccaatatggtgaacagacaacctgtgaatggtaaaaaaaaaaaatgtgcagtctattcatcaaatatatagaatctacaagtaactcaaataagtcaactagaaataacaacttcataaaagagtgagcaaaaacgagatatttctcaaaagaagacatacaagtgttcaacagaaataaaacatgctcagcatcacaaatcatctgataaatgtaaattacagacaacatgatatagcatcttccaccagtcagaatggctattaaaaataaaacagatgtttgcagagaagcataggaaaaataatgctttttatatgcttgatgagaatacaaattggtacaacctctatgaaaaacaatacagaaatttctcaaagaactaaaattagaattaccatttgacccagtaacccctcctggtgggtatgtttctcccaaaaggaaacttctatataagaaaaagtcacctgcattcctatttttattgcaacactattttcaatagaaaagtcaagtaatctctctaagtgtcaatcagtggatgattaaataaaatatgatagatgtaaatcatggaatactatgcagccataaaaaatgaaattgtgtctttcacagcaacatgaatagagttgaaggacatttcctaaataaaataactcaaattctcttttataattggaaagcaaacaatgggtacacatgtacatagagaaaaacaatagacactgggtactgcaaaagaaggcaaggtgagaggaaagtgagggttaaaaaatcagctattggctccaatgttcactatggggtaacagttacatcagaagcacaaacctcacctttatgaaatatattcatgttacaactctgcacatgtgcaccctgattctatgaaaataaaaacagaaaacatgaacagaattgttagactgctagctagattgaccaacaaacaagaaaaatgcaaaagtagcaattctttgttttgtaaccctttctcattttctggtaccataagaaattgtagactatcgtcctatattcttttctgaagtgctaccattagccatttctcaaagaaattctggttccttttttcttttattttctttcattttttttagacagagtctgcaacgtccacctcccaagttcaagcgattctcctgtctcagcctcccaagtagctgggattacagacgtgcaacaccacacctggctaatttttgtatttttagtagagatgaggttttgctatattggccaggctggtcttgaactcctgacctcaaatgatctgcccacctcagtctcctaaagtgttggaattatgggtgtgagccactgcacccagccgctggttccttttacagaagaatagtattaaaaactcatatcttgattcttgatgtactttttgttaatttcttgtagaacatctcaagtaatcaatacaggaagtatttgttgtgtattaacccatatatatatatacccacatctaaacggtttttatttatgttcctatattatgctaaacttgcaaatccactgagataccctaagttaataccacatgaatgattttcaccttccttctatgcctttccctaacctagcactccaaccgtggggaaccccctcccaccacacaccatccattccctttgtagtccatttccaggattcctgtagagtggaacccgattgtgtaagttgtgctcttttgtggaacatcatcaagtggagtccagtgctgacgtgcagtttcttttttctttaatcttatggactacactatttctgaacctacttagtacctcttttgatttcatacattagtataatggcataagatattttctatatagtctgcattccatcctggaattcctaatcacctatttttttaaaatttcttgtggattaagattgtattagtcagtgtcccctagagggacagaacaagtaagatacacatacacacacacacacacacggagtttattaaggagtattaactcacactatcacaaggtccacaataagccatttgcaagctgaggagcaaacaagccagtccaagtcccaaagctgaagaacttggaatccgatgtttgagatgaggaagcatccagcaggggagaaagatgtaggctggaaggcgaagccagtctaatcttttcatgttcttctgtttactttttattctggccacacttgcagctgattagattgtgccacccagattaagggtgtatctgcctttttcagcccactggctcaaaggttaatctccttcggcgacaccgacacagacacacccgggatcaatactctgcatccttcagtgagatcaagttggcactcagtatttagcattacaagtccaccctttgtcaacttgaacccatacacatctcctgagattatacataatcttcaaataaagacaagaataaagtcataattatgcctaataatacaattattcttcttacaactggaaacacaccaatccccaatccaaatggtactacatatgctccactccctcaaggacacagccaggatcatctgatgacttggtgtctagatggcttcagcacttttaattttacctccaatgttagactccactttatcaatgcagatgtagcagaatattttaagacattgatatgctgaaaaattcaacagttcataaaagttgccttcccaccacagccagtggttactactgaataaggacctgccatcctctagggagaagctataatggatggggtgcactgttggtggttatggaaatcgatccatcgtggcaaatggcagcatctttctttgataacattatattctattgtgcatatataccacattgtctttattcatttgtctatctactgacagattttttccatatgtttgctgttattaatagtgtttcaataaacataggatgcagatatcttcacaaggtggtaatttcatctcctttggatatactcccagaaacaggattcctggtcatacaatatttctggctttaattcatttaggagcctttatactgctttccataattgtgaaaatgtagaatggtatagccattatgaaaaacagtttcagttttgaggtatgatctgtaaacaaataatgtttgttatggctctcaatgagagtttctactaaatatgatggaaggtcaggaaggtctctcaccttaaagcagggatggattatgcctcttatttcctaaaagcaaaagattggaagcatgcatgatggaggtggttggcaggtttcaggatgatctcataagaggagaatctgttggataaaactgttgggttttcagtcatagacacacctacactcaatatgaaatgatgaaatcaagtgaggatctagaatgtgttcgcttgaagcaacagcatattctcaaaggcacctattgctccatcacaagggtgatgaacttttgaaaccagtaaagtgtgagagcacagtaagtgataaagttatcacatttacatgaagtttgtttaatgtgccaagggctcgcacagattaatcataaataaacacaatgtattttagcatacatagatgtctagagaagaatcttcttagagaaacttcttcaggttacagaaatctgtgtaagttgtagatctaatggagaagtgtctatgaatactggtctgtttttgaagtatggaaagatgatctcttttggagtaggcttgcgattgtgttgatttcttaattgtttcttgagttgtaacaaaagaaccaaaaaaatgactaaccggagtttcatggctgtgttgataaaaatttttcataagctttctgtcaattatttgagaccagatttcctgatttttttctccaatagatacatgttcacaagatctcaggaaaccacctctcaggtgctttagtttaaaagactagcttcctagaaaaagaagattctgtctaaccatgacaagttggtttcatctgcaaaccatcaagtttgagacctcattgtcaagaatcataaaaattttaactccaatgtactgaaaatcataaatctcgaatttaatgttgataggcattgacaaaatggttcattcttggatgcgtcctatgttgctggctcaacatatcagttaattgagaatcctcacttagctccctctgtttgtagcactgagttgattgtcaatcttcagagtcatccgttgaaggagagtcctgaggttcatgggattcttgtagacactcaggggaacaaaagaaagaaacagaattgagggctgccagccatttccacatcactaggaataattaccatctaagtataaaggtctgcatcattcagaacaccctgcatgacaggctgatgcaaaaaatccaaccctacagaggctccacagcaacctttacagttctttccgggaagaaataatctccaagttaagtgagtcagtaaagctgctctgagctacagtaaaaattggattgggcccgatttgtctgagttcagtgtaattattatactcagctgctgccccaatatagactgaggatggataatttaaatgagcctggctatgtggtttgttatatatctgaactaaataaacataaagggcctgtctggactagcgtgagggtgagagatcctgggagccccagccccccatactcttatctcccttcctccaggaacctctaggttctcagggtgagaatccacaagatccattcatggctctattaccaggagaccaaaatctctgaccttgttcatacagacaaacaggcgaaggacatttttagatccttatctatgtggcgaaaggcaatctatccccattacaagccttaccagcaaccttcctttgtcatgaaaatgggtaaaattagccaataggattacatttaagaaaattttcctgtgatgttccagccagaaaacagcaaaaatcagcttcacacctggagacttcttgcatcggtcacagcccagagaaagaagatcaccatagcattaaaatgcaactgtaagaacatgtaatgcttccatgttccacgcattacgtctcaccagtttagtcaatatggattaaatatgagagtgtggcaattcgcaaactctatctgaggaggaaaatcggataaaaaatgttatgaaaaataaagcaatttgaagcctctgacttcagcaacttcaccactaatgaaatgatgtaaccctcattggcctcaaatttagttttcacggggcatctgcagggttccaaagtgagaccaggtgaattcaatgtgcatgcacttcccaagtgtccacttgtattctgtttctttacttctgtttacagaaagtagacacatattcagtcttagtaccagtgtagggagcgctttccatgagatggataccagaaaaaaatggcaaacatgggatccgttaatataaaaattagccacgatgtatatatatatatgtgtgtgtgtgtgtgtgtgtgtgtgtacacacgcgcgcgcatgtgtgagttgaatagcagagttggagtgggtttctatccacatgtacctgcacctgcaggtattctcaggtgccataatcaactgtaggaccctaaaggaaataagagtctcccctcaacccctgaagagtgtttgggttcaccgtgtgtccaatgattctgtgcctcttgagctccaggaaagggctccctggtgatgcatgagatcttttcttggagtctctctgcagagttcactgggtttcctaaaggcaattcactatttcaaaagatggtgtgaggagcatgtggtgtccctaaaggagaattctgagccagggcacaaccactttatactgagctggatacactggtaggaatatactctgtcagctcagatagaaacctccctgcatggttggggctgggctgcagggggcgctccggatacacccagcacaggctcccgccccagagcaggtgcacaggaggctggggagaggttcctcccagggcctgggacttcctttaaaaatatctaaaataagtatttcacaaagactgctgaagtttgtataaatatctattcaattgtgagcatttatcaaactggatgttgtaatgagaaccacttttacaatggggatttcaaactctgctggaggtcaggaagagatcctttcttataaataaatgcaatttttggataaacacagtcattccctaaataacgcattcacatattatggtctagaaatgatgcaagttgaccctgagacagtcaaatgtggtttcaaagtgaggtgctgtccttgaggagcttgttctccagtgggggaagctctgtcaacacagagttcagggatgtgtaggggacacatggcctctaacaggattacggcttgaaccctcagcttctacagttgtgtcacccatgtgtctgtttctcatactgggtcaggaattgggctattaaatagcatccttcatgaatatgcaattaactgaggtgactatagtatctccgttccctgagagcctcacccaacaaccacacccctcctctggagaagcccctagatcacagctcctcaccatggactggacctgaaggatcctcttcttgatggcagcagcaacaggtaaggggctccccagtctcagggctgaggaagaaaccaggccagtcatgtgagacttcacccactcttgtgtccactccacaggtgcccactccctgcagctggtgcagtctgggcctgaggtgaagaagcctggggcctcagtgaaggtctcctataagtcttctggttacaccttcaccatctatggtatgaattgggtatgatagacccctggacagggctttgagtggatgtgatggatcatcacctacactgggaacccaacgtatacccacggcttcacaggatggtttgtcttctccatggacacgtctgtcagcacggcgtgtcttcagatcagcagcctaaaggctgaggacacggccgagtattactgtgcgaagtacacagtgtggaaacccacatcccgagagtttcagaaagcctgaggaaggaggcagctgtgctgagctgaggcagtggtacagcagttttctgaacttccatagtatctcattttgcattgagttccgctttaatattagccaagaatatgggatagacgggtgctcctaagagatccttaacttgcccattttgatgggttttcccaaagacgtgagaagccacttttttcgcaaagcatcccaaagccatgccctgctccagaaacacgtgtatccatttcctggtctttgattaactgacaaactctcatcagcgcacctgggctaatttcacatcaggtagaaatatgtgctttaaagcaaggctaacgttgtaatagcaattcctgcttaataaccttcagcattgttgttgtgtgctccatcaactaattacgttagttcaaggttctcaatgggagtttctaataaatataagggatgtatagaagttcccctaattaaaacaattgtgaagacaacctcagtgttcaaccatatttcaacccttcaccacaaaggaactttcatctctcctggaagttgggttcattttcaaattagtttttttattttaatatctcaagattattgtatgtgactattttagcagaaagtgaattatgggaacttgaactaaccaactgaaaatacattcagaactaattaaacaagatgccagaatgtgattggctccaggcattttaaattcaacaggttatgtaaccaggctttaaatttgcacatcttcgtgttaccttcatgacacagtcaactcccattatgtaagaaatggtgagtgcattcccaagggtcttgcacagttataaaaatagacttgatgaggtgaggagttgtttaaattcccctctgaagaagcagcatcaacccaacaaaccactctcttccctctgtgactagagctctgtcacaggccacatggacctaaatccttgatggagattacaggactacgtaaattggactgatcgtttttatgctgttaaattaataggtgagtctgcactccagcctgggcaacagaataatcttgtctgtaaaatacaaaagaaagataaattaatagatactgactttgacatttcggataataatattttcataaaccgaatttaattatacccacattgttacctacaccttcactgaaaagttcctagttatgttgagttccatcaacactccacatgttcaaatctggacatccaagagagtctagagaataaaacgcaatgagggcagtgaaacttgcgtatattcagcacctcttaactcaggaggactcaatacaccctggaacactctgcttttctgaatggctcacaatgactccagctcactctccaacctcctcaaacatctggcctctgtttgccctaagttcacgctctgctcttagtctatgttctgaagtctttgtagaggtgaaaatgagctgtcagatggatcttccttctcactgcaacatggaatttgctatttcacttaatgaccactctttccacaatggttgatttcttttggcctgttcattactggtgattttcaagggaatctcagttgaatctttactgttttgcattttgtctccatgacaatgttgggaagtttttcttctagcagcataacatgatctagtgacctgacacatttgcagcaaacaatacctacaaattcagaagctctttggttttctttccacgaaatataattcttgctcttctgtgtatgagcacatcctagcatccctgtacacacccacgtagatgtctacacgccgatgaaatattccctgtaaataaaaaaagtatctcagtttctctcaatgttcataattctcctgagggtgaggaaggtacttctgggtctgctcaaacaaatggcccagagaccacctggtaggtaggtaaggagctcacctcgctctggatattgagtctgtctctttccctctgtcgtctcatagaaggccagcccacttgttcagctcctaagaagagagcccaggtttatccagattatacaacacaaccagcttctgatgactctcctgttacaacatccatggagatattttgtgtattatataattcaccaaactaatgtgaaatgcccaagttgcaatactgcacaccctagggtatgttcttgcaattcagcggaggagaaattctttcagagacagatggatctgaattggtaaatatgtgggtacgaattctgggcttgagtgtcattgtccagccatgtttcacaggtgtgacctgtcagggaagaaccagagttccttgttctctcagagggtagagctcacagaggtcctctctggttcccaggaaaggtaatttcactaatcttggtgatgagactatcctccagtgctgatgtactatagagttttcatctgaagctgtcactgctatccccaatgtacatcttttcacacagaaatgtttagaggtcaggccatattctcagggttacacattgagaaggatggagatatattctactaccttctcctgagatctcacacacaatctcaaatttcaaaaggtctcagaagggcagctctcaggtactatttaaaaataacccacttcctgggacaggtagcatccttctaaccatgatggatgttctgaactacagtacacattgcatggatccaggtttgtctcaattcactgtgattattacactcagcagctgtttcaatatgtctgaaggggtaaatgacaatttaggtgacctgggtgtatggttggtgttatatgaatctttaaatgtagaacagtattaactgtattccaaaatctgtctttgatccatgatcacacttgtctcccagaccagctccttcagcacatttcctacctggaagaagaggactctgggtttggtgaggggaggccacaggaagagaactgagttctcagagggcacagccagcatacacctcccagggtgagcccaaaagactggggcctccctcatccctttttacctatccatacaaaggcaccacccacatgcaaatcctcacttaggcacccacaggaaatgactacacatttccttaaattcagggtccagctcacatgggaagtgctttctgagagtcatggacctcctgcacaagaacatgaaacacctgtggttcttcctcctcctggtggcagctcccagatgtgagtgtctcaggaatgcggatatgaagatatgagatgctgcctctgatcccagggctcactgtgggtttctctgttcacaggggtcctgtcccaggtgcagctacagcagtggggcgcaggactgttgaagccttcggagaccctgtccctcacctgcgctgtctatggtgggtccttcagtggttactactggagctggatccgccagcccccagggaaggggctggagtggattggggaaatcaatcatagtggaagcaccaactacaacccgtccctcaagagtcgagtcaccatatcagtagacacgtccaagaaccagttctccctgaagctgagctctgtgaccgccgcggacacggctgtgtattactgtgcgagaggcacagtgaggggaggtgagtgtgagcccagacaaaaacctccctgcaggtaggcagagggggcgggcgcaggtactgctcaagaccagcaggtggcgcgcggcgcccacagatcccgaggccgggtccggagcaggtgcaaggagggcggggcttcctcaacagctcagtggtctgtctcctcgccagcacctcagatgtccccaggactctctttctttattatctgtggttctgcttcctcacatccttgtggcagggaagaaaggaggaagacaatttttctgtttactgttgaggtttcaccaattactagaaactttcctacaagttcctgcatgactcattttgccatatatggattctcaccatctcttgatttgtttcatcaatcgaattgtgccctatttgaaattaacttactgaaaccttaaatccaatggatctatactggaattttaatgatgtaattgaggttaaatgtggtcaaagtgtgagaccctaatgcaataaaccgttgtctttataagaagaggaagagacaccagagacctctcacttttcacgtgcacacagagaagaggccatgtggagacgtagtgcactagaaggtggccctgtgcaagccaggaagaagccatactaagaaccaattttgccagctccttgatcttcgacattcagactgtagaattgtaagaaaatcaatatttgttgtttaagccacccaatcctgttgtcttcttacgaagacccaaactgactaataccacctaactctgttagctctgtctcctggagggagaagcagccccctgaggctgggcactgcatctctcagatttccacgtgaagtaggcaaaaatagtagttctcatataaaaatgtgtcatggctctgttggccatttttgagcatggtctctgaaaccagccctggtgtgtgtgtgtaacaaatgtcccttatcttttatttggacataacaaatagacgataggtaccagctggatggagattggccactgatcatcttctgttctccttagtatgtcacagaaaaccacaccaacatcaccagcatcactgtttttcttctaccacctcaaacggactacagaaatgatccctgcagtatggtctatttcttcggctttcgaaatttgcactgaatctcttcctaaatggggagctacatggggtctgagttttgttcctttcttcccagtcttccccaagtaccaaggacagaatagacttaaaatttggccatcaatgcccccaaacaccacatcactttctaaaatccacatcctgcatccatccttctctggacacccctcatcaggctacccaggaatggccagaatctggtatcagcttatgggctgaggccacgagttatacacatgtgtgatttcagtcacacacactctacttcaggaccacacctgtgttctgaggagctcaggcacctgctgatctcagtaattctctaataaatcacacacctcttattaataaaggtccagatggccccatcagctgcagagcagtggagtaaagctcatgggtgggtccatcaggcagaagtcagacaatggaagggatggctggtcacttccattttcactgatgttcgcaatgaattttaatggaataaaacaatattaactacaaagagacagaaaagaagactggctcgtcaagatatttaaggacaaggaactttatttggggggaaagtgaaagacacttctaaatggaaatccctaaagcacatacagcagctgacagagtggccactgtgcacatgagggctgaggagatggatggtagagtccattcctgcaacatgtctctgggtgtgtgatggttagactcctcatgcatatgaatataagagctggactcatggagaaaaaaagggccatatcccataggaaaggaagaaaaaaaaacagatgggcacccctggagagagctcattagatttggtgtgtttaagatgaaaatttcttccaaaaattgtaatgttctaagctaaatatgaatctcttcaataaactgagaataggagaatggagctaggacttgagagaggaaacaaatcttgagagagcagaaagcaaatccacaaaaactgtcacatgacagaggtcagaatggagctgatgtagctacttcactattctgcagacttattgaccatgtggagaaggggcttgaacaaatggagacgttctccaaccttctgaatcagcctccttcttatgcatgagtagaaatcatagttctgggggtgaccttcccaattttcctgtccatacctcttcccccaggggtagagtgtcttcccaaccacaatggtttctcaccagtgttctcagcttctcctccattgtacttaccctgcagattaagaatttcttctagatggagttctttgggaattttctgttttctttagtttctgttgactccaccacacccccataggatacaggttttattggatttcccctggaaatagtgggggtggatccaggcgttcaacagtcctcgctgttcttcccttcctgtcagcaccacaggacagcagataagggagttgactgtggatttttcaaattcctgggaaaagcctgcaaggactagtagattcacactctaataccattagcacatgtatccaaaaagaaacctcactaaatatttccaggttagcctgttcctctctcagtgccatccagtggcacctgccctgggttcacgaacatgtgggccccagtcctctctgctggcatctctctcctcacatttcagtcttctcgttagctctgtgaaagcagctcagatatgttaaaaggttttcttcttcatttattcagtttttcaggtttactgttaaggaggtcagaataagatcatagtttcctcatttttcacatttgcacgctgagtagccactttctatataaaagccagaaactaagggaacaaatcaaatatccatatccactacaggtgaacgttaaaaaatttgacatatgattatggactaaagtacaatgcagaattagaatcaaggcatcctcattctcataaaagcatgtctacattctcaaataactctgctgagtgaaagtagctgaagaattaagagtgcacttcataaacttctaattgtataaactgcagaaggtacaactattctaaagtaacagagcagatttgaaatttgggagaaatgggtgttgaaagtaattgggtggtgagatgaaattacagagaagtgacagaaagatttaggggttaacttaattgtacacaacctgattaaagtttgcacacatacgttaccattttccaaatggtgcagtgtagatttgaattaattattaattgtacttaaagcagtaacaaagaaacaaatgaatatgttggttgaggaggagcaaaaaatagatgggtatgaacactcaaaacatctcagactcttgaaagtacacatgcttgaacactggttttctctgtatactttaggtaaagagcagaatacattaaaagaaaacagagatgtcctggcgggggtggaatcctgcaaacctcactaggcgtgtcccacactgccctggagttgtctcaggggagcagtctcctctagtggtcagagacacaggcatggataatggggctaatactgtccagctgtgtgaccttgaacacattgtataaacactgttccatatgtaatttatcttccttaaaatgtaacattgacacttgcattaaatgtattctacaaatatgtcaaaaagaagatgacgactgctaaatgattatcaaggcacaatcatataatataatgatattttcctgagtgataagatgactaccaatctcccccagggcactttgtttgctctgagccctgcgcctcctcaggattcccatcccagagcttgctatacagtaggagacatgcaaataggtttctccctctgctgatgaaaaccagcccagtcctgaccccacagctctgggagagaagcgccagccctgggattcccaggggtttctatttggtgatcaggactaaagacagaggacccaccatggagcttgggctgagctgggttttcactgttgctgttttaaaaggtgaactagagagattgagcgtgagtggatacccttgagagaaatggtggattatgtctgggagtttctgaccaggatgtctacgagtttgcaggtgtctagtgagaggtacagctcgtggagtccggagaggacccaagacaacctgggggatccttgagactctcctgtgcagactctggattaaccttcagtagctactgaatgagctcggtttcccaggctccagggaaggggctggagtgagtagtagatatacagtgtgatggaagtcagatatgttatgcccaatctgtgaagagcaaattcaccatctccaaagaaaatgccaagaactcactgtatttgcaaatgaacagtctgagagcagagggcacagctgtgtgttactgtatgtgaggcaccaggtaagaggacatcagtgtgaacacagacacagtttcctgcaatgacaagggaggaggctgggctaaaaggggcactcaggacccactgaaaacgggcagctctagggcaggtacagatggttatcatgggctgctttccttcagggtctgtggcctcctctgcatctaccagttcccctcggagcctctggacatttatgtttctgtggccacccctgacatctctggattagaaaagtttattataggaagaggaaacattctcatttgtcccaaagcagatgtaagtaatggaagcaaaaaatgcacaggaggccaggcggggctgtagatactgtcaccccagaatgtcaatctcaccactagtactggagagggaagggagtttgatggaccttccctaacaaccctgtggtccaagataagtccaggaagaccattggtgcctcccagagcacagttgtccatcagggatgtccaatgcgtcccagcagcagccatgcctcagtgtctccactgtgcacagccactgtctgggaggagctcccaggatgggtgtctttggcacacaccaggtggcgggtgttagagtgcagtgcagcagctggctgcctgttctattgggctccctgatgctggagagatgggaggtgcattcgcagggccagcaccctgtttgtgaatttttatataaaaaccctgattttacttcatttttgcagatgacatagataactaaaaacagaatctgcaaagaaattgtaattttcaactttaccccaaattcattgtttcttaattctgtgcaagatccagacatattattgccttcctcatgataatttattctatgtaaaaccgaaatcattttttctcctactctttgtttctgttcaagtacagagatcttgagcaaagtaagttgggttctttccacacactaaccctcaccttccccagagaatgagcagagattgtcctcagtctgagtctaagggaggagctgtttctggcacaatcagagcctgcagagacccccaggtgcagcttcagtgaagtcagacatttctccatgtgggcgacctccagtgcctgtgactgctgctcaggcctaattgttggttaagtattacgacaccctttaggtgatcacatctcaagcctattctgaaaatcaccatgaacagagatagttcaatggccattctcctgacataagtttctctttattacttggttccaagtatggagaaaaatgtgaccctatatttgtctgaatccaacatcagcatccacggcattacgctaggagactcactaattgagcacaagtgagctcgttattctcatagaaatgtaagtatttggaaatttcagcgtgttctccagaacctgtggctgccaacaactgtatttctcggtgcactcttggcctggtgaagccttcacagaacctctccctcacctgtgccatctctgcattctccatcacaaccagtgtttccttctggagctgcatccatcagcgcccccatgggaggtactggagtggatcgggtgcataggtcatggagggagcacagattactcccctcttctcaagagtccagtcaccatctccagatccatgtccaaaaagtacttcttcttacaggtgaactatgtgagcaacaaacacatagccatgtattttagagcaaaagacacagtgaggaaaccacagtgtgaactcatacccaagcctccctgtgggggtgcataggacagccagggttactcaggacaccaggctccctcaggacaccaaggggcactcaagaccattgtagaggcatgcaggtagctgggggctctcaggaaccatgggggaaaatcaggacaccaaagggtgcttggtacagcagggggctcaggattattgtggggattcagaaagagcaggttcaaggctcaacctcagggcatgtgcagctggtgtgaaaaggggctggatgaggcgttttgtgtcaccatcatgtttcaccaccagacaccctccactacctctattctaatgcatgtgtttgtatgattagaaaatgatattgatataaatatataaccatagctaggtgtgtcaagttgtcctctccatcttatatcagccttgtctgtaaggactaattccccataattacttgagaacctcataaattgtggtcaattatgtaggattcctctctttttctgccttccttcctccctccttctctctctcacacagaaacttatatacagccaccccacaacacacataaatctataacttttattacctgatgtattgataagtaatctaaagttacataaaaatcagtagttcactgtcaatattgtaggagaagggaaggtctaggaaggaggaattacagaacaagaggatattttgagggtaattgacttgttatctatgtggataatgataatgtctatgaccatatttgtaaaattgaacacttcgtgtggagactattatttttttatttaaccccatgccattattttgccgtattctagcatttctctaaaaatacagaaatgttcagcactcattcatgtgtatattcaggagtttctgacttttcatgtattttatttatctctgtctaattgctttgataccaaattttacctagtataattagtactacctttagcactgattataagtctcactcctccatcatctccttttttgccacacaagctgaatctagtttggactcataggagctgcttcattcaatgccagtgggagtttcaaaccctatcaacccccctataaactgtcattaagaaagtttatcaaactccaccagtcatgtgatattagttcgttttcacagtggtataaagaactacctgagacgaggagtttacaaagaaaagaggtttagttgactcacagttctgcatggctggggaggccacaggaaacttataatcatggtggaaggtgaaggcgaagcacggcacatcacacagggcagcaggagagagagggggaagtgacacatagttttaaactatcagctcttgtgagaactcactcactatgatgagaacaacatgggaaaactgccctcatgatccaataacctctcacctggtccctcccttgacatgtggggattagaatttgagatgatatttaggtggggacacaaaacaaatctatagcacatgtccagctgtgtcctggagttgtttcagggatccagtgtgtactgttgatagaaacagtgatcatcattctagctggtgtgagatggtatctccttgtggtttagatttgcatttctctgatggccagtgatgatgagaattttttcatgtgtcttttggctgcataaatgtcttcttttgagaagcgtctgtgaaaaaaaaaaagaaacagtgacaccaagctcacaccatccgttgtagttgacaacatgcaaagccaagagatctcaactgagatttagtgtgtgtgtcatgtctgatgaagtcataagctcagagcaagtgaatatggaaaagtgtattatctgcacagtgtaggtgtctgctgagtgcagggcaggtctcgcaggaaaatctaaaatggcttgaaagaagaggaaaggagactggctcagggtttttataatggtttagtggtggtggcacagtgaggcttcccactcacagatcggggtttataaggtttgaaactcccactgccattgaatgaagaagctcctgtgagtccaaactagattcaccttgtgtggcaaaaaaggagatgatggaggagtgagccttaagtaatcaacaggcatgcaccaaaagatagagcgacaacttattctaggtagcaagaataaaaataatgaaaaagaaataagggttcagtatgggtggacaagacccagatctacagaaatgagatgactttagaaatataaggaaataataatgagaaaaagaaggaggggatggggaattagggtcctggcctaatgtcttgggtagaagcttctcacaatcaaggactatcagcttattctgcaggtcttgggtcacacgtctgcttaaaaacatcagaaatgccaggcaatcaatgaggatgctcagtttagcatctcctatttgagtagatttacagttgtgtggaattcttaattgattctttttggtttgtttttagaggcaggctctcacactgttccacagcttaaagtacagttgtgtgatcatagctcactgtaattttgagctccggactcacgtaatcttcctgtattagcctcctgaatatctagaattagaggggaacgccacccctcacctgcttattctttaaaatattttttcatagaaatagcatctctttatgttgcccaggttggcttcgatttcctggtctcatgtgatttccctcactttgcttctgaaagtggtgtgattatagggaagatccactgcatctgtcctgaattgattcttcagttgtaaaacatgaagccaataattaactgcctgactgttttgtgcagtgagttagttaaaagtttctgataagattccttccaatatgattcaagagcagtattttctgctgatgttcctttcagtttccttgttgaagatcagaagacactgcggaaaagatgtagtaaaaaggcagttttaactcttcatgattggagtggatatcacataggaatccctttccgtattttgtaacacatgcatgcaatagaacaaagatgatcccttggtgtaaaatctataaacgtatgggccttttagctaccaagtcatagggtaataactgatggaccctgaggagtgaaccatgattccatagtgctagtgggagaacccttggccaaggaagtttacattttattaaaattgataatttttatgtagcgatgccattttttaaacattcccagaaggttgtgagtgggattgactctgtcttctgtgaacaatgacagtgccctccatggttagataatattttaaactagattgagctagagtggtttctgtattgaatcactatatttttttagcttcatgttagctttttgtgtgttagcatttgctttaaaatgatattaatcagccctctagtaggtagaaattcatctgagggtttcttcccttgttgtccatctcaataggatttccagaagacgtaagaaccctctctgtttctaaaaatattccaggctgggcgctgtggctcatgcctgtaaacctagcactttgggaggccgaggtgggtggacccctcgaggttgggagtttgagaccagcctggtcagtatggtgaaacctcatctctactaaaaatacaaaaattcgccgggcatggtggtgtacactcgtaatcccagctacttgagaggctgaggtgagaggattgcttgaaccctggaggcgggggttgcagtgagccgagattgtgccactgcacttcagcctgggcgacacagcgagactccgtctcaaacaaaacgacacaaaaaattccaaagttgtgcaccctctaaaagcatatgtacttaattctcatttttaatttattaaacatctctaataagttcaatgtttcctgccttctgagttgatttcctaacacatagaagaatatatcctaaatgaaagtttgtgttcttaatacaaattactagttaataacctttacttttattattgaggtattatacatcaatgttaatcaatcctctcaatgggactcttacctaaagaatatataaaatattttcctgatcatgacatataatagatgtgaacacattcttagcattcagccatgtctcttgtctattaatattataaaccacatgctaactttgattttattggtaattgttctaatttcttttttttcccacttctctggttgttttttttttaactttaagttttagggtacatgtgcacaatgtgcaggttagttacatatgtatacatgtgccatgttggtgtgctgcacccattaactcgtcatttaacattaggtatatctcctaaagctatccctcccccctccccccaccccacaacaggccccagtgtgtgatgttccccttcctgtgtccatgtgttctcattgttcaattcccacctaggagtgagaacatgtgttgtttggttttttgtccttgcgatagtttgctgagaatgatggtttccagcttcatccatgtccctacaaaggacatgaactcatcattttttatggctgcataggattccatgatgcatatgtgccacattttcttaatccagtgtatcattgttggacatttgggttggttccaagtctttgctattgtgaatagggaattgttctaatttcaaactagttaatttttatcttcatgcagctagattattatgtgtggctatttattccgagagggataaagacaacattaacaattttcactgcaggcatgtctaggcaactccctgtgcactatgaccctggggcgttggagattctatggggactcttccctacctgcctaggagagttctctgccttctacctctagcattttcctctttgaagaagtacatctaactgtcattagaatagagacaaagacaagtcttaactgcttccagctgaggagggatgctgtttggggaagatctctcttggaggtctaagggaccccaggaaaagggagccattatcccaggcttcagttgcatgaccatttggagtttgatggtctgaaaatgagaagaggcaaatctggttattagaagacatgtatgaaaaccaaacaaggtggcaaggacagcttgaaagaaaattccaaggctgctgacattcctagataactgcagctgtagttatgcctgctaaggtttgggcgcatggggcttggcttttgtcagctccctgggatttattttcccaaacaaagaaacctccaggttaggggcaccctattcattcccatcacctggcatgatttaaaggataattgcttagaattaaaatattgatccagattttttatattccccatcgctttttgtttcttctgggctgtagccagagatcattgattggcgctcaggaataagcagagttagtctaaaatgcaggcaaatacttaaacaactgaagagattagaatttaaagacaagtgtatgatatgttttgaaatacaatgtttctctttccagttttggtttttgtcggcagcaaataatgataagactgagttgtttgcaaaataaactttagtcttaaacttggcctgattatttgcataaagtgcagcaagaatattaataataattctgtaggaaaagcctgcaagcaccaggagcttcacagtctaacactatgagcacgtgcatcctcacgcaactcactgaatatttccaagccagcctgttccgatcttaaatgccatccagtggcatctgccccaggtacactaatacatgggtcctgcttctctctgcagcctcctctctcctcagatttcaggttttgtttattgtttgttttctctctgacatcaacacagatatgttgaaggttttcttttttttatttgtagttgttcagctttgttgttaatgaggtcagaataagctcatagtttacacatttttacattcccatgccgagtagctgcttttctctatcaaatccattaactgagagaacaatcacatttcgttacaggtgaacagttaaatagtttggcatatatttctgtgctggaatctaatgcagcttgaaatcaagtcatgcctcactcattgaaaaaaacatggctaaattctcaaagaattgtgctgagtgaaagaaactaaggaattaagagtaaattttacatgatacatttgtagaaattttagaagatgccactattataaattaacatggagaagatttaaatgtttctgagaatatgctattgggagtaatggggatgtgagttaaatttcagaggaataagagaaagatttagggattaattttttcaaaccttgattgaagtgctgagtaaatggttgcaaacataggtctacatttttcaaatcattcaccataaatttgaattatttattaattacactcgaataaagcaataaagaaactgatgagataatatttgactgaattgcatcaataaatagatcgatattaacacaaggaatataactgatttccaaaaacatacacatgaaccatggttcactctgcgtatttagataaattacagaaagttgtcataacagatggggaatcctgcagacttcactaggcatgggccatgctgccctggagttgtctcaggggagctgcctcctccagaggttagagcacaggcccaggtaataggactaaatttttagatgtgttatcttagacacactgcacaactgctgtgttctctatgtaaattatctcctgtaaaatataacattgaagcctgcattaaatatattgtgtaaatatgtaagaataaaagaaagttatgagagctaagtgttaatcaaggcacaagcatataagatataactatattttcctgaatgatggaattactaccagtctcccccaggacacttcatctgccctgagcccagcctctcctcagatgtcccacccagagcttgctatatagtgggggacatgcaaatagggccctccctctactgatgaaaaccagcccagccctgaccctgcagctctgggagaggagcccagcactagaagtcggcggtgtttccattcggtgatcagcactgaacacagaggactcaccatggagtttgggctgagctgggttttcctcgttgctcttttaagaggtgattcatggagaaatagagagactgagtgtgagtgaacatgagtgagaaaaactggatttgtgtggcattttctgataacggtgtccttctgtttgcaggtgtccagtgtcaggtgcagctggtggagtctgggggaggcgtggtccagcctgggaggtccctgagactctcctgtgcagcgtctggattcaccttcagtagctatggcatgcactgggtccgccaggctccaggcaaggggctggagtgggtggcagttatatggtatgatggaagtaataaatactatgcagactccgtgaagggccgattcaccatctccagagacaattccaagaacacgctgtatctgcaaatgaacagcctgagagccgaggacacggctgtgtattactgtgcgagagacacagtgaggggaggtcattgtgcgcccagacacaaacctccctgcaggaacgctggggggaaatcagctgcagggggcgctcaggagccactgatcagagtcagccctggaggcaggtgcagatggaggctgtttcctgtcaggatgtgggactttgtcttcttctgacagttccccagggaacctcttaaatttagaaaactgtgcctaacaatgtcttctctatgcatatgaggaccttttctccctggcacaaaatgcagattgacgctgacacggatgaaaattcctcaaccatggtcacaaggatcagagtcctgagtaacctcagggcttcctggtgattcttctccaatcagacccaggacagggacctccgtgagattccctgactggaacagtctttatggatcctggtcacagacaatagagaggctgaaccagggtcagcgtcatgtagaacgtcacagatttcacgtctgatccttctcctgacacgaaagtatgcaaatcagtatcagcaccgatctggtgcttcttttgttcctaatccatttactttcttttttcgtcgtttttctcctttttccatttgtttttcctgctttttgcaaaaggaagatgttttccctgtgagatgcaggggatgacaattttgggagatggctggaacatccaatatcctcagggccgaccatcagtaagtgcaggctagaagtctcagaaagagctgaagctgcttaatcaccgtggagttttaccttctccagttctgctctgatggaatcagggccaagcaggttatcaatgataatctacctaacatagagtcaactgattccagtttcaataacgtctgttaaaaattcacaccaccacctggattactgttttgtcaaatcaatacacagtattgtccagctaagtagacccaaagacggaccgttgcccatggagaaaaacattaacctgagttctaggttcttacagtgttaaaggtgtaaaactgattattaaaaatgaggctatttttctttttgctgttgagttgtagaagtttcttttccattttgacatgaaaactttttcagatatatggcatattatccaattctgtaagttgtagttattttgttgctttgcagaatctttttcataatctattcccacttgttcaattctgcttttttttgtaggtgatttgaatgtaaaatcctgaaaaagattgctaattttttgagtgttgagagttttacaattagaggtattacagttagatatttgaggcatttggagtgaatttttgtgtttattctaacctaaaattcttaattcttttcatgggaaaatccagttttcataccaccctctttggaagacactacaatttagccatgttatattgatggttctcatgctaaaaatcagcttgtcatcaatatgtgggtttatatctaagctctatataggtatttaagccaaaactttctatgtttttaataaatgttgaggcctggaagtgaaatgcctaaagctttcttcttgccttgttacagatattgtaccaaaatattctaaccttttactattgagtgtaataatagctgtggcctttcttaacggcttttattatgttcaagttgttttcttgtcttcctactttgttcatagttttaataatgaaactgatttttttcaaagtctttttctgtgtctgatgaaatgttactgagatattttttctttagttttttaatgtgtaccaaactgattgatttgagaatgttgaatcaagtatgcatctcaggaagaaatttgagttggtcatggtgtatgtcttctaaaacactttggagcttagtttactattgttggggattaattcatgtctactaatgatattggtctgtagtttcctttattgtggtgcctttgtctattactggtaatactatcatggtagtctcatagaaagagtttagaaggtgtatggcagactacctttaaaatagattttatcagtggagaaatggtgatagttttttcttcacttttctgttgggaagaattttatgttgtttaaaagatattcagaatgacttaacctggtttatgagctttcattctattcctttcttccattctttttgaagaactgcttacctttcctatttatttttaagtttgtttttagacatatgcaatacattttgaggtgaaacctggtggaattttttccaataaattagtaaaaataaatcatttaattgactattttattcaggttgatttgtttaatatttgctaaaggccagttctttaagctatgacacataataaatcccaaatggcagtacctcattgtttacttagcttttgtacttatatttttcagaggaagaaccactactgtaaattgtaaatagccaatacataattgtattgtatgcaaatctgtgactgtttacagtgtcatctctgagaaacataaagtttatttactatatatatataaagagtttggaaggtggactccaccaatttttgaaagagttacagaagggctgctattacttctttaaatgttaaggttcattttatgatgtaacagataacctatcatggagaatgttcaatgtgttcttgagaaggatgtgtattacgtgactcttggttggaaggttctgtaaatatcattcagataaatttgttcaatagtgttgttcaagttcagaggcacattgagaattttctttctggatttgctaaacattatggtcatgaggtattaaggtcttgtgttatttttgtattgttttctatttctttatatctcttacagtttgcttaatgcagttatatttgtatttgtacacatgtgtaaaaacaaaaatcataattgctaaatgagttttatggcacagtcacattataagtaatatttttccaaatgctaccattgccactaaagtcctcctggagtctgacgtctgctctgggcactgccttcttctcaggcgtcccacactggagcttgctatagaggaggaggcatgaaaacagggccctccctctcctggtgaaatcaagcccagacctgaccctgcagctctgggagaacagccacagccctgggattcccaggggtttccatttggtaatcaggactgaacacagagaactcactatggggtgtgaattaagctgaatttttcttgttggtattttaaaaggtgactcctagggaactagagtgagtgagagtgagtggatatgagtgagagaaacagtggatatgtttgccagtttctgaccaggatgtgtgtgtattttcaggtgttcagtgtgaggtggagctgatagagtccatagaggacctgagacaacctgggaagttcctgagactctcctgtgtagcctctagattcgccttcagtagcttctgaatgagccgagttcaccagtctccaggcaaggggctggagtgagtaatagatataaaagatgatggaagtcagatacaccatgcagactctgtgaagggcagattctccatctccaaagacaatgctaagaactctctgtatctgcaaatgaacactcagagagctgaggacgtggccgtgtatggctatacataaggtcccaagtgaggaaatatcggtgtgagtccagacacaacatttcctgcaaaaagaagaaaggagtctgggccgaaggggacactcagcactcacaaaacaggtgcagccccaaggcaggtgcagatggagggagggtaagggctgctttccttcagggtctgtggtttcctctgcttctaatatttcccctctgaacctctgtatatttatgttttgtgcccaccatgaggtccctggattagaaaactaatttaaaagaggaaatattctcatatgtcccaaaaacagatgtaagttttggaggcataaaaatgcataggagccgcgtgagtctgtagacactgccaccccacaatgccagacccaaaactagtgctggagaagggtgggagtttgatggagcttccctgatgaccccgtggtccaagctaagtccagcaaggccattggtgcctcgctgagcacagttgtccatcagggatctcccatgtgtcccagcagcagccatgcctcagtatctccactgtgcacagccatcgtctgggaggagctcccaggatgggtgtctttggcacacacaggtgatgggtgttagagtgcagtgcagcagctggctgcctggtctattgggctcctggatattggagggattggaggtgcattctcaaggccagcacgctgtttgttaatttttgtataaaaaccatgtgatttaattcattttctcagatgacatagataattaataacacaatctgcaaacaattgtaattttcaactttaccccaagttcattgtttcttaattctgtgcaggatccagacatggtattgcccttctcatgagaaattgttcgacctaaactgaaaccagttgtttctcatatactttggttctccccacatgcagagatcttgattagagcaagtttggtactttccacgcactcaccctcacctccccagataaagagcagaagttctccttagactgagtctgagggaggagctgttcctgtaccactcagggcctgcggagacccccaggtgcagcttcactgagtcaggtgtttcactccctgtgattgctgctcaggtctaattgtgggctcagaattaggacagtcttcaggttatcacagatcaatcatattctaaaaatcatcattatcacacaccgtggtaataattcaatgttcatttttctaaacagcagtttctcttttttatttggttgcaagtttgaggaaaggagcatgtgataatactttttaatctaacctcaaaatctactgaattgttctaggagactcacaaattggacaagagtgagctccttgtgctcataaaaaatgcatgtatttgggaatttcaccgtgttgtccagaaactgttaacatcaacaactgtgttttccagtgcacttctggcttgagacatcctcacagaccctctccctcacctgcactgtctctggattccccatcataaccagtgtgtcctgctagaattgtatctgcttgcccctagaagatggacaggagtggatcaggttcatgggttgtaaagggagcaaaaattacatcccacttctcaagagtccatatccagatccaagaaacagttcttacagctgagctctgtgcccagtgaacacacaactacacattttgaagcaaaagacgcaatgaagggccttcattgtgagcctagacacaaacctccctgcaggggtgaataggagcagcagggggcattcggggcagtatgggggcttagcatgattgttgggggtcaagatgagcaggatcaaggctcatcatcagggcaagtgcaacagggcagaaaaggggctgtagatgtgggttgttctcaccatcatatttcaccaccagacaccctccactacatctcttctaatgtgtctgagtgttgatatgattagaaaatggcatttatgtaaatactaatgtatacccaaatggaggtgcatccagttgtcctctccatcttatgtggaccttgtccatcaagggctaagttcctgtatttacttgattacctcatacattatggtcaaaacaggtagggtctcattttggcatggtctctcctcctcccttctctctgtcgcacaaaaacacatgaactgacacacacagagcttcccaacttcaattatctgatgtattgaagcaaattgattagtgtgcagcttttctgctttgcctgctattcatgttatgtaaaaataagaaccgtgtgtttctcagcttgttacttctctaagctaagtagcatctttgtttattatacccagagaccaaaagcgattcagctgttattcagcagcttaactggtaaacaaattgtggaaaattcatttactggaataatacccactgttacaatgaagtactgctggatacactcagtaccatgcttaaaataacaagtacctgaataagtaaaataagtcaaacaaataaaagtgcatacatatgattccacttctataatttctataaagtaaaaatgaacttaaagttacataaaaagatctgtagttgactggggacatggtacaagaagagaaggtatagaaaggagaaacgacaggagagcaaaaggaaatttctaggataattttttctctgttagtaaaagtgaggattatgtcactatttgtaaaattgtccactttatgtaaaggttcttatttgctaatttcacctcattaaaatattgcaaattttaaaatatctaatttggtagaaaaggtagtagagagagatgaataaaatacataaaattcagagagtcctgaatacacacatgaatggaccctgggtctcactgtacttttagggagacactagaatacaaaaacataatgacaggatttcagtacatgaaaggagcttctcagaccccaggaggcctgtccaactgcgtctgggagttaactcagggagcaggcatgtcctttggaaggagcaatgacaccaagctcccagcatccattgtagccgacaccatgccaatgccaagagatctcgactaaaattttctgtggatgttgagtgtgattatgccacacactcacaccaagtgagtatggaaaggatagttacctgcatccttaaggtgtctgctgagagcagggcaggtctctcattaaggtccaaagtggcttgatagagcagggaaggagactggctctgggttgttatcatggcttggtggggagcggggcagagcatcctacttgcaggaagggttttgtggggtttcaaggtcaaattggcatcaaatgagggagctcctgtgatttctaactagatttaccttgtatgcttaaaaaaagagatgatggaggaatgagcctgaagttatcagcagtcaggcctaaacacagagtctgatgacttactctaaatagcaagtatacaaatgatgagtaagaaaagagacaagactccaatatgggtggacaacagccaggtctgcagaaaatgagaagactgtttataagcaaagaataatgagtaggatatggaggaggattctggtccaatgtcttgtgtggaagcttctcatgatttgagatcatcagcttattctgaaggtcttaggtcacctgtcttcttcaaaatatcagaagtgcctgatgatatgtgaggatgcacagtttaacttcctctatttgagtagctttacaattgtgtagagttcttaattaattaattttttttttggagacggagtctcactctgttgtgcaggttggactgcagtggtgtgatcataacatagctcacggtgatttcaaattcctggctcatagaatcctcccacctcaacctcctgactagcaagtagctaggtttccagggcccttcatctacacttggccggttcttttcattctttttttttttttttaggtggagtttccctcttcttgcccagactggagtgcaatggtgccatctcagctcactgcaatctccccctcccaggttcaggtgattctcctacctcagcctccagagtagctgggatcacaggcatgtgacaccatgccccgctaatcttgtatttttatcagagatgacatttctccatattggtcaggctggtctcaaactccctacctcaggtgatctttccacctcagcctcccaaagtgctgggattacaggcgtgaggcaccgcaactggcctcttcatttttattcatatgttccttcagcagccactatgtcttcccactgatttcttcagtttctgccttttccttttgaataaggcattattcctaagggaagtcgggaggtgggcctggacagggacttggtgcattcctctctcccgtcccagttcttattggtttctccagtggctgtagaacagcagttttgatggctttacctctgcagataatttctcttgcaatgtagtgctgatggggaggtgtgtctggatgcacttcacctatagttgctgttttgctttcccagacagcaccatcccaaggggtagagggtggagcattttgtgatgtatccccagtactgaagaaaaaggcttcaatagcaggaggaattcctcaactgtatacactctgagaatttaaacaataacttctctatcatactcaaattgaaaccatccaatgaatatgtctactttaatcgtgtgctaacttaaatggcatttggcagcctctgtgccagaaaagattatcatctgctcctgtttatttccctgcaagtccttatctctcttcagatttcagatatattgtttgtcctataacatcaaaaatttgatgtatatgtgctaatttgcagatcagtaagtttagtagctgttgtaagaataataacatatttttatggggtgcttacatctccaagctgagaagcacctctatgtgtaatactaagaaactagaaatgatacaaatatcaagaagatacatagataaaaagtaatggcatgctaatttactgtaataacatccatcatgagaatcaatacattgttgatgctcaacatgtttgcatcataagtagttatgtgcgagaagccacacaaatagaacacatactatataattcctgtataattcttgaaactcaaaactaaagcattaaatatgaaggactgactcagaatatggtggggaagaaaatatttgggaaggaggaattgtagaggaacacaaggaaacttttaagtgtaatttgtttgttcattatttggatggcttttggggatgcaaaggtgagcacgagtggaataacattttgttttgtttgtttgtttgtttttctgaagagatgtggtccttctctgtgacccaggctggagtgtagtggtgggatcatagttcaatgtagcctctaacttctggtctccaacaatactcctgcatctgccatctaagtagctggaactaccgttgtgtgccaggaggtttggcttggcttgagtacttattaaaccacacactttttgcaatatttaatgtatagtaataatgtctcaataagactattacaaatcaatgaatgaataatttgttcagtacagattcatggaaaaatagacactaacatgatgagtgtctgacatttatgaaaatacagctgcatgaaatgtgcttctctttacattcattaggtaaacacaatagtgcatacacatcacaccgtgctttcattacaggaagaaagttctgaaaatgtcactggggtgaaccacacggtgctgggcttggttcagggagcagtcaggcccagtgttgtgaccttcaaccacagaatccttaaaaaaaaaaaaaaaaaaaaaaagaggctgcctcaaagtccgcatcagttcccggactcgctatgtttctggatcgtatcagtgcatccggatctccctggtggctttagtgattccttgcttgccatgctgaggtctcgctgtagattatgttgggttttctaagaccgttttgctattgtaagatccactccctgggacagagcgattccctctaaacctgatagaggttctgaactaaaaataacattaagtgaatcctggtgtgtctgaactcaagtgattgttacattaagctgctgttccaatctgtttcctcacctgggaaaagaggagccaggacatagtgagttgaggccccaggaagataactgaattctcagagggcacagccagcatcctcctcccagggagagtctaaaagactggggcctccctcatcccttttcacctgtccatacagaggcaccacccacatgcaaatctcacttaggcacccacagaaaaccaccacacatttccttaaattcagggtcctgctcacatgggaaatactttctgagagtcctggacctcctgtgcaagaacatgaaacacctgtggttcttcctcctgctggtggcagctcccagatgtgagtgtctcaaggctgcagacatggagatatgggaggtgcctctgatcccagggctcactgtgtgtctctctgttcacaggggtcctgtcccaggtgcagctgcaggagtcgggcccaggactggtgaagccttcacagaccctgtccctcacctgcactgtctctggtggctccatcagcagtggtggttactactggagctggatccgccagcacccagggaagggcctggagtggattgggtacatctattacagtgggagcacctactacaacccgtccctcaagagtcgagttaccatatcagtagacacgtctaagaaccagttctccctgaagctgagctctgtgactgccgcggacacggccgtgtattactgtgcgagagacacaatgaggggaggtgagtgtgagcccagacacaaacctccctgcagggaggcggagggggcgggcgcaggtgctgctcaggaccagcagggggcgcgcggggcccacagagcatgaggccgggtcaggagcaggtgcagggagggcggggcttcctcatcagctcagtgctctccctcctcgccagcacctcagctgtccccaggcctcctctttctttattatctgtggttctgcttcctcacatccttgtggtaggaaaggaaggaggaaggcaaattttcctcttacagtcaaagtgtcactaattactaggaactttcctacaagttcctgaatgtcccatttttccttcttaattaaaaaaaatatatattctaatacttctcaccatctcttgatttgtgtcatcagttgaattgtgctgtctttgaaattcaaatgctgaaaccttaaatccaattgatctatattggaattttaaggatggaattaaggttaaatgtgatcataagtctgagattctaatgcaatagatctgttgtctttataagaagtggaagagtcaccagagacctctcacttttcccgtgcacgcagagaagaggccatgtggagacatagtggactagaaggtgcaagccaagaagaagccgcaccaagaaccaaccctgccagcacctggaccttggacattcagacttcagaatggtgagaaaatcaatgtttgttgtttaagccacccactcctgttgtcttcttatgaagacccagacagactaataccacataactctgttagctcctggagggagaagcagctccctgaggctgggcacatctctcagatatccatatgaagtaggcagaaatagtagttctcatataaaaatgtgtcatggccctgttggccatttttttttgacggagtctcgctctgtggccaggctggagtgcagtggtgcaatctcagctgactacaaaccccgtctcctgggttcaggcaattctccttcctcaacctcctgagcagctgggactacaggtgtccaccaccatgccagcctattttttttttgtatttttagcagagacagggtttcactgtgttagggtggtctcaaatctcctcactgcatgatctgcctgcctcggtttcccaaagtgttgggattacaagtgtgagccaccgcacctggcccctgttggccattcttggggcaatgtctctgaaaccagccctggtgcctgtaccacaaaattttcttttatctttcatgtggatataacaaatggacaatgaggaccagctgcatggagactgaccactgaacatcttctgctgtctcctaagtaagtcacaggaaaacacaccaacatcaccaacataactgttttccttcaacttcctcgaacgaactatagaaatgatcccttaaagtatagtctattccttcaactttctcaatttgcactgaatcccttcctaaattaggagctacatagggtctgagttttgttccctttctcccagtcttccccaagtatcaaggacagaatagatttaaattaaatttggccgtccatgcccccaacaccacatcggtttctaacatccttgtcatgtacccatccttctgtgggcaccccacatcaggttggccaggaatggccagaaggtgtcatcaccttatgggctgaggctacaagttatacacacgtgtgatttcagtcacacacactctactgcaggacacacctgtgttctgaggaactcaggcgcctgctgatctcaggtcttctctaataaattacacacctcttatgaatgaaggtccagatggccccatcagctgcagagcagtggattaaagctcatgggtgggtcagtcaggcagaagtcagacaatgggataatagaagtcagacaatagtcactgaggttcccaatgtattttaatggaataaaacaatattagcaacaaaggggcagtaaagaagactggctcttgaaggtatttaaggaccaggaactttatttggggggaaagtgagagacacttttacatggaaagccctaaagcacatacagcagctgacagagtggccactgtgcacatgagggctgaggagacggatgataggttacgttgctccaagatgtccctgggtgtgtgatggttggactcctcatgcatatgaaaataagagctggactcagggagaaacaagggccataccccatagaaaaggaagaaaaaaagcagatgggcacccctggagagagctcattagatttggtaggtttgagatgaaaattacttccaaaggttttaatgttctaagctaaatatgaatctcttcaataaagtgagaattaaaagaagaatggagctaggagttgagagaggaaacaaattatgagagagcagaaagcaaatccacccaaactgtcacatgacagaggccagaatggagctgatgcagctacttcactattctgcagacctagttgaccatgtggagaaggggttcgaacaaacggggatgttctccaaccttccaaaacaacctccttcttatgcatatgcagtaatcatgattctcagggtggccttcccaagtttcctgttcttacctcttcccccaggggtagagtgtcttttccaacccacagtggtttctctgccatgtcctcagcttctcctccattgtacttaacctgaagattaaggatttcatctggatggagtttcctgggaatcctctgttttctttggtttctgatgaccacatcacaggccataggacacaggttttagtggatttcccctggagacagtggaggtgaatccaggcgttccacagtccttaccgttcttctcttcctgtcagcaccgcaggacagcagataagggagctgactgtggatttttcagatccccgggaaaaagcctgcaaggactaatagtttcacatctaacaccattagcacatgcatccaaaattaaaaaaaaaatcctcactaaatatttccaggttagcctgttcctctctcaataccataccgtggcacctgccctgggttcggtaacatgtgggccccagtcctctctgtaggcgtctgcctcctcagatttcagtcctcttttttgctccgtgaaagcaactcagatatgttaaaaggttttcttcttcatttattcataatttttcaggtttgttgttaatgaggaaagagtaagatcatggtttcctcatttttcacattcccatactgagtaactgctctctctctatgaaagccagaaattaagagaacaactcaagtatccatatccattacaagtgaatgttagacaatttgatgtatgattatgaactaaagtacaacacaggattagaatccaggcatcctcattctcataaaatcatggctgcattcacaaataactgtgctgagtgaaagtagctaacaaattaacagtgcacttcataaacttctatttgtataaactgcagaaggtacagctattctaaagcaacagagaagattacatattggtgggaactgggttttgaaagtaatggggtggtgagatgaaattacagagaagtgacacaaagatttaggtgtgaattgtacacaaattaattgaagctctgattaaagggttgcacacatgttaccattttccaaattatgcagtatatatttgaattaattattaattgtatttaaataaagcagtaacaaagaaacaaatgaatacatttattgaggtggagccaaaactaaatgggaatgaacactcgaaacatctctgactcttgaaaatacacaagcgtgaacactggttctctctatgtatttcaggtcaatagcagaatacactaaaagaaaacagagatgtcctggcaggggtggaatcctgcagacctcactaggcatgtctcacactgccctggagttgtctcaggggagcagtctcctctagtggtcagaggcacaggccgagataatggggctaactctgtccagctgtgtgaccttgaatgcattgtataaacactctgttctctgtgtgatttatcttccttaaaatgtgacattgacacttgcattaaatgtattctacaaatatgtcaaaaagatgatgactgctaaatgattatcaaggcacaatcatataatataatgatattttcctgagtgataagatgactaccaatctcccccagggcactttgtctgctctgagccctgcacctcctcaggattcccatcccagagcttgctatacagtaggagacatgcaaataggtttctccctctgctgatgaaaaccagcccagtcctgaccgcacagctctgggagagaagcgccagccctgggattcccaggggtttctatttggtgatcaggactaaagacagaggacccaccatggagcttgggctgagctgggttttcactgttgctgttttaaaaggtgaactagagagattgagcgtgagtggatacccttgagagaaatggtggattatgtctgggagtttctgaccaggatgtctacgagtttgcaggtgtctagtgagaggtacagctcgtggagtccggagaggacccaagacaacctgggggatccctgagactctcctgtgcagactctggattaaccttcagtagctactgaaggaactcggtttcccaggctccagggaaggggctggagtgagtagtagatatacagtgtgatggaagtcagatatgttatgcataatctttgaagagcaaattcaccatctccaaagaaaatgccaagaactcactgtatttgctaatgaacagtctgagagcagcgggcacagctgtgtgttactgtatgtgaggcaccaggtaagaagacatcagtgtgaacacagacacagtttcctgcaatgataagggaggaggctgggctaaaaggggcactcaggacccactgaaaacgggcagctctagggcaggtacagatggttatcatgggctgctttccttcggggtctgtggcttcctctgcatctaccagttcccctcggagcctctggacatttatgtttctgtggccacccctgacatctctggattagaaaagtttattataggaagaggaaacattttcatttgtcccaaagcagatgtaagtaatggaagcaaaaaatgcacaggaggccaggtggggctgtagatactgtcaccccagaatgtcaatctcaccactagtactggagaggcatgggagtttgatggagcttccctaacaactctgtcttccaagataagtccagcaagaccattggtgcctcccagagcacagttgtccatcagggatgtccaatgcttcccagcagcagccatgcctcagtgtctccactgtgcacagccactgtctgggaggagctcccaggatgggtgtctttggcacacaccaggtggcgggtgttaagagtgcagtgcagcagctggctgcctggtctattgggcctgatgctggagagatgggaggtgcattcttggggccagcatgctgtttgtgaatttttatataaaaactctgattttacttcattttcgcagatgacatagataactaaaaacagaatctgcaaagaaattgtaattttcaactttaccccaaattcattgtttcttaattctgtgcaagatccagacatattattgccttcctcatgataatttattctatgtaaaaccgaaatcattttttctcctactctttgtttctgttcaagtacagagatcttgagcaaagtaagttgggttctttccacacactaaccctcaccttccccagagaatgagcagagattgtcctcagtctgagtctaagggaggagctgtttctgcacaactcagagcctgcagagacccccaggtgcagcttcagtgagtcagacatttctccatgtgggcgacctccagtgcctgtgactgctgctcaggcctaattgttggttaagcattaggacactctttaggtgatcacatctcaagcctattctgaaaatcaccatgatcagagatagttcaatggccattctcctaacataagtttctctttattacttggttccaagtatggagaaaaatgtgaccctatatttgtctgaatccaacatcagcatcaactgcattatgctaggagactcactaattgagcacaagtgagctcgttattctcatagaaatgtaagtatttggaaatttcagtgtgttctccagaacctgtggctgccaacaactgtatttctcggtgcactcttggcctggtgaagccttcacagaacctctccctcacctgtgccatctctgcattctccatcacaaccagtgtttcctgctggagctgcatccatcagcgcccccatgggaggtactggagtggatcgggtgcataggtcatggagggagcacaaattactcccctcttctcaagagtccagtcaccatctccagatccatgtccaaaaagtagttcttcttacagctgaactatgtgaggaacaaacacatagccatgtattttagagcaaaagacacagtgaggaaaccacagtgtgaactcatacccaagcctccctgtgggggtgcataggacagccagggttactcaggacaccaggctccctcaggacaccaaggggcactcaagaccattgtagaggcatgcaggtagctgggggctctcaggaaccatgggggaaaatcaggacaccaatgggtgcttggtacagcggggggctcaggattattgtggcgattcagaaagagcaggtccaaggctcaacctcagggcatgtgcagctggtgtgaaaaggagctggatgaggcgttttgtgtcaccatcatgtttcaccaccagacaccctccactacctctattctaatgcatgtgtttgtatgattagaaaatgatattgatataaatatataaccatagctaggtgtgtcaagttgtcctctccatcttatatcagccttgtctgtaaggactaattccccataattacttgagaacctcataaattgtggtcaattatgtaggattcctctctttttctgccttccttcctccctccttctctctctcacacagaaacttatatacagccaccccacaacacacataaatctataacttttattacctgatgtattgataagtaatctaaagttacataaaaatcagtagttcactgtcaatattgtaggagaagggaaggtctaggaaggaggaattacagaacaagaggatattttgagggtaattgacttgttatctatgtggataatgataatgtctgtgaccatatttgtaaaattgaacacttcgtgtggagactattatttttttatttaaccccatgccattattttgccgtattctagcatttctctaaaaatacagaaatgttcagcactcattcatgtgtatattcaggagtttctgacttttcatgtattttatttatctctgtctaattgctttgataccaaattttacctagtataattagtactacctttagcactgattataagtctcactcctccatcatctccttttttgccacacaagctgaatctagtttggactcataggagctgcttcattcaatgccagtggttgtttcaaaccctatcaacccccctacaaactgtcattaagaaagtttatcaaactccaccagtcatgtgatattagttcgttttcacagtggtataaagaactacctgagacgaggagtttacaaagaaaagaggtttagttgactcacagtgctgcatggctagggaggccacaggaaacttataatcatggtggaaggtgaaggcgaagcacggcacatcacacagcgcagcaggagagagagggggaagtgacacatacttttaaactatcagctcttgtgagaagtcactcactatgatgagaacaacatgggaaaactgccctcatgatccaataacctctcacctggtccctcccttgacatgtggggattagaatttgagatgatatttaggtggggacacaaaacaaatctatagcacatgtccagctgtgtcctggagttgtttcagggatccagtgtgtactgttgatagaaacagtgatcatcattctagctggtgtgagatggtatctccttgtggtttagatttgcatttctctgatggccagtgatgatgagaattttttcatgtgtcttttggctgcataaatgtcttcttttgagaagcgtctgtgaaaaaaaaaaagaaacagtgacaccaagctcacaccatccgttgtagttgacaacatgcaaagccaagagatctcaactgagatttagtgtgtgtgtcatgtctgatgaagtcataagctcagagcaagtgaatatggaaaagtgtattatctgcacagtgtaggtgtctgctgagtgcagggcaggtctcacaggaaaatctaaaatggcttgaaagaagaggaaaggagactggctcagggtttttataatggtttagtggtggcggcagagtgaggcttcccactcacagatcggggtttataaggtttgaaactcccactgccattgaatgaagaagctcctgtgagtccaaactagattcaccttgtgtggcaaaaaaggagatgatggaggagtgagccttaagtaatcaacaggcatgcaccaaaagatagagtgacaacttattctaggtagcaagaataaaaataatgaaaaagaaataagggttcagtatcgatggacaagacccagatctacagaaatgagatgactttagaaatataaggaaataataatgagagaaagaaggaggggatggggaattagggtcctggccgaatgtcttgggtagaagcttctcacaatcaaggactatcagcttattctgcaggtcttaggtcacacgtctgcttaaaaacatcagaaatgccaggcaatcaatgaggatgctcagtttagcatctcctatttgagtagatttacagttgtgtggaattcttaattgattctttttggtttgtttttagaggcaggctctcacactgttccacagcttaaagtacagttgtgtgatcatagctcactgtaattttgacctccagactcacgtaatcttcctgtatcagcctcctgagtatctagaattagaggggaatgccacccctcacctgcttattctttaaaatattttttcatagaaatagcatctctttatgttgcccaggttggcttcgatttcctggtctcatgtgatttccctcactttgcttctgaaagtggtgtgattatagggaagatccactgcatctgtcctgaattgattctttacttgtaaaacatgaagccaataattaactgcctgactgttttgtgcagtgagttagttaaaagtttctgataagattccttccaatatgattcaagagcagtattttctgccgatattcctttcagtttccttgttgaagatcagaagacactgcggaaaagatgtagtaaaaaggcagttttaactcttcatgattggagtggatatcacataggaatccctttccgtattttgtaacacatgcatgcaatagaacaaagatgatcccttggtgtaaaatctataaacgtatgggccttttagctaccaagtcatagggtaataactgatggaccctgaggagtgaaccatgattccatagtgctagtgggagaacccttggccaaggaagttcacattttattaaaattgataatttttatgtagggatgccattttttaaacattcccagaaggttgtgagtgggattgactctgtcttctgtgaacaatgacagtgccctccatggttagataatattttaaactagattgagctagaatggttgctgtattgaatcactatatttttttagcttcatgttagctttttgtgtgttagcatttgctttaaaatgatattaatcagccctctagtaggtagaaattcatctgagggtttcttcccttgttgtccatctcaataggatttccagaagacgtaagaaccctctctgtttctaaaaatattccaggctgggcgctgtggctcatgcctgtaaacccagcactttgggaggccgaggtgggtggacccctcgaggttgggagtttgagaccagcctggtcagtatggtgaaacctcatttctactaaaaatacaaaaattcgccgggcatggtggtgtacactcgtaatcccagctacttgagaggctgaagtgagaggattgcttgaaccctggaggcgggggtcgcagtgagccgagattgtgccactgcacttcagcctgggcgacacagcgagactccgtctcaaacaaaacgacacaaaaaattccaaagttgtgcaccctctaaaagcatacgtacttaattctcatttttaatttattaaacatctctaataagttcaatgtttcctgccttctgagttgatttcctaacacatagaagaatatatcctaaatgaaagtttgtgttcttaatagaaattactagttaataacctttacttttattattgaggtattatacatcaatgttaatcctctcaatgggactcttacctaaagaatatataaaatattttcctgatcatgacataaagtagatgtgaacacattcttagcattcagccatgtctcttgtctattaatattataaaccacatgctaactttgattttattggtaattgttctaatttctttttttttcccacttctctggttgtttttttttttaactttaagttttagggtacatgtgcacaatgtgcaggttagttagatatgtatacatgtgccatgttggtgtgctgcacccattaactcgtcatttaatattaggtatatctcctaatgctatccctcccccctcccctcaccccacaacaggccccggtgtgtgatgttccccttcctgtgtccatgtgttctcattgttcaattcccacctaggactgagaacatgtggtgtttggttttttgtccttgcgatagtttgctgagaatgatggtttccagcttcatccatgtccctacaaaggacatgaactcatcattttttatggctgcataggattccatggtgcatatgtgccacattttcttaatccagtgtatcattgttggacatttgggttggttccaagtctttgctattgtgaatagggaattgttctaatttcaaactagttaatttttatcttcatgcagctagattattatgtgtggctatttattccgagagtgataaagacaacattaacaattttcactgcaggcatgtctaggcaactccctgtgcactatgaccctggggcgttggagattctatggggactcttccctacctgcctaggagagttctctgccttctacctctagcattttcctctttgaagaagtacatctaactgtcattagaatagagacaaagacaagtcttaactgcttccagctgaggagggatgctgtttggggaagatctctcttggaggtctaagggaccccaggaaaagggagccattatcccaggcttcagttgcatgaccatttggagtttgatggtctgaaaatgagaagaggcaaatctggttattagaagacatgtatgaaaaccaaacaaggtggcaaggacagcttgaaagaaaattccaaggctgctgacattcctagataactgcagctgtagttatgcctgctaaggtttgggcgcatggggcttggcttttgtcagctccctgggatttattttcccaaacaaagaaacctccaggttaggggcaccctattcattcccatcacctggcatgatttaaaggataattgcttagaattaaaatattgatccagattttttatattccccatcgctttttgtttcttctgggctgtagccagagatcattgattggcgctcaggaataagcagagttagtctaaaatgcaggcaaatacttaaacaactgaagagattagaatttaaagacaagtgtatgatatgttttgaaatacaatgtttctctttccagttttggtttttgtcagcagcaaataatgataagactgagttgtttgcaaaataaactttagtcttaaacttggcctgattatttgcataaagtgcagcaagaatattaataataattctgtaggaaaagcctgcaagcaccaggagcttcacagtctaacactatgagcacgtgcatcctcacgcaactcactgaatatgtccaagtcagcctgttccgatcttaaatgccatccagtggcatctgccccaggtacactaatacatgggtcctgcttctctctgcagccgcctctctcctcagatttcaggttttgtgtattgtttgttttctctctgacatcaacacagatatgttgaaggttttcttttttttatttgtagttgttcagctttgttgttaatgaggtcagaataagctcatagtttacacatttttacattcccatgccgagtagctgcttttctctatcaaatccattaactgagagaacaatcacatttcgttacaggtgaacagttaaatagtttggcatatatttctgtgctggaatctaatgcagcttgaaatcaagtcatgcctcactcattgaaaaaaacatggctaaattctcaaagaattgtgctgagtgaaagaaactaaggaatgaagagtaaattttatatgatacatttgtagaaattttagaagatgccactattataaattaacatggagaagatttaaatgtttctgagaatatgctattgggagtaatggggatgtgagttaaatttcagaggaataagagaaagatttagggattaatttattcaaaccttgattgaagtgctgagtaaatggttgcaaacataggtctacatttttcaaatcattcaccataaatttgaattatttattaattacactcgaataaagcaataaagaaactgatgagataatatttgactgaattgcagcaataaatagatcgatattaacacaaggaatataactgacttccaaaaacatacacatgaaccgtggttcactctgcgtatttaggtaaataacagaaagttgtcataacagatggggaatcctgcagacttcactaggcatgggccatgctgccctggagttgtctcaggggagctgcctcctccagaggttagagcacaggcccaggtaataggactaaatttttagatgtgttatcttagacacactgcacaactgctgtgttctctatgtaaattatctcctgtaaaatataacattgaagcctgcattaaatatattgtgtaaatatgtaagaataaaagaaagttatgagagctaagtgttaatcaaggcacaagcatataagatataactatattttcctgaatgatggaattactaccagtctcccccaggacacttcatctgccctgagcccagcctctcctcagatgtcccacccagagcttgctatatagtgggggacatgcaaatagggccctccctctactgatgaaaaccagcccagccctgaccctgcagctctgggagaggagcccagcactagaagtcggcggtgtttccattcggtgatcagcactgaacacagaggactcaccatggagtttgggctgagctgggttttcctcgttgctcttttaagaggtgattcatggagaaatagagagactgagtgtgagtgaacatgagtgagaaaaactggatttgtgtggcattttctgataacggtgtccttctgtttgcaggtgtccagtgtcaggtgcagctggtggagtctgggggaggcgtggtccagcctgggaggtccctgagactctcctgtgcagcctctggattcaccttcagtagctatggcatgcactgggtccgccaggctccaggcaaggggctggagtgggtggcagttatatcatatgatggaagtaataaatactatgcagactccgtgaagggccgattcaccatctccagagacaattccaagaacacgctgtatctgcaaatgaacagcctgagagctgaggacacggctgtgtattactgtgcgaaagacacagtgaggggaagtcattgtgcgcccagacacaaacctccctgcaggaacgctggcgggaaatcagcggcagggggcgctcaggagccactgatcagagtcagccctggaggcaggtgcagatggaggctgtttcctgtcaggatgtgggactttgtcttcttctgacagttccccagggaacctcttaaatttagaaaactgtgcctaacaatgtcttctctatgcatatgaggaccttttctccctggcacaaaatgcagattgacgctgacacggatgaaaattcctcaaccatggtcacaaggatcagagtcctgagtaacctcagggcttcctggtgagtcttctccaatcagacccaggacagggacctccgtgagattccctgactggaacagtctttatggatcctggtcacagacaatagagaggctgaaccagggtcagcgtcatgtagaacctcacagatttcacgtctgatccttctcctgacacgaaagtatgcaaatcagtatcagcaccgatctggtgcttcttttgttcctaatccatttactttattttttcgtcgtttttctcctttttccatttgtttttcctgctttttgcaaaaggaagatgttttccctgtgagatgcaggggatgacaattttgggagatggctggaacatccaatatcctcagggccggccatcagtaagtgcaggctggaagtctcagaaagagctgaagctgcttaatcaccgtggagttttaccttctccagttctgctctgatggaatcagggccaagcaggttatcaatgataatctacctaacatagagtcaaccgattccagtttcaataacgtctgttaaaaattcacaccaccacctggattagtgttttgtcaaatcaatacacagtattgtccagctaagtagacccaaagacggaccgttgcccatggagaaaaacattaacctgagttctaggttcttacagtgttaaaggtgtaaaactgattattaaaaatgaggctatttttctttttgctgttgagttgtagaagtttcttttccatttggacattaaaactttttgagatatatggcatattatccaattctgtaagttgtagttacttggttgctttgcagaatctttttcataatctattcccacttgttcaattctgctttttttttgtaggtgatttgaatgtaaaatccagaaaaagattgctaattttttgagggttgagagttttacaattacaggtattaaagttagatatttgaggcatttggagtgaatttttgtgtttattctaacctaaaattcttaattcttttcatgggaaaatccagttttcataccaccctctttggaagacactacaatttagccatgttatattgatggttctcatgctaaaaatcagctcgtcatcaatatgtgggtttatatctaagctctgtataggtatttatgccaaaactttctatgtttttaacaaatgttaaggcctggaagtgaaatgcctaaagctttcttcttgccttgttacagatattggaccaaaatattctaaccttttactattgagtgtaataatagctgtggcctttcttaacggcttttattatgttcaagttgttttcttgtcttcctactttgttcatagtttttataatgaaactgatttttttcaaagtctttttctgtgtctgatgaaatgttactgaggtattttttctttagttttttaatgtggtgtaccaaattggttgatttgagaatgttgaatcaagtatgcatctcaggaagaaatttgagttggtcatggtgtatgtcttctaaaacactttggagcttagtttactattgttggggattaattcatgtctactaatgatattggtctgtagttttcttttattgtggtgcctttgtctattactggtaatactatcatggtagcctcatagaaagagtttagaagatatatggcagactacctttaaaatagattttatcagtggagaaatggtgatagttttttcttcacttttctgttgggaagaattttatgttgtttaaaagatattcagaatgacttaacctggtttatgagctttcattctattcctttcttccattctttttgaagaactgcttaccttttccttttaatttttaagtttgtttttagacatatgcaatacattttgaggtgaaacctggtggaattttttctaataaattagaaaaaaataaatcatttaattgactattttattcaggttgatttgtttaatatttgctaaaggccagttctttaagctatgacacataataaatcccaaatggcagtacctcattgtttacttagcttttgtacttatatttctcagaggaagaaccactactgtaaattgtaaatagccaatacataattgtattgtatgcaaatctgtgactgtttacagtgtcatctctgagaaacataaagtttatttactatatatatataaagagtttggaaggtggactcctcaccaatttttgaaagagttacagaagggctggcattacttctttaaatgttaaggttcattttatgatgtgacatataacccatcatggagaatgttcaatgtgttcttgagaaggatgtgtattacgtgactcttggttggaaggttctgtaaatatcattcagataaatttgttcaatagtgttgttcaagttcagaggcacattaggaattttctttccggatttgctatacattatggtcatgaggtattaaggtcttgtgttatttttgtattgttttctatttctttatatctcttacagtttgcttaatgcagttatatttgtatttgtacacatgtgtaaaaacaaaaatcataattgctaaatgagttttatggcacagtcacattataagtaatatttttccaaatgctaccattgccactaaactcctcctggagtctgacgtctgctttgggcactgccttcttctcaggcatcccacactggagcttgctatagaggaggagggagggcccctctcctggtgaaaacaagcccagacctgaccctgcagctctgggagaagagccacagccctgggattcccaggggtttccatttggtaatcaggactgaacacagagaactcactatggggtgtgaattaagctgaatttttcttgttggtattttaaaaggtaactcatagggaactagagtgagtgagagtgagtggatatgagtgagagaaacagtggatatgtttgccagtttctgaccaggatttgtttgtattttcaggtgttcagtgtgaggtggagctgatagagcccacagaggacctgagacaacctgggaagttcctgagactctcctgtgtagcctctagattcgccttcagtagcttctgaatgagcccagttcaccagtctgcaggcaaggggctggagtgagtaatagatataaaagatgatggaagtcagatacaccatgcagactctgtgaagggcagattctccatctccaaagacaatgctaagaactctctgtatctgcaaatgaacagtcagagaactgaggacatggctgtgtatggctgtacataaggttccaagtgaggaaacatcggtgtgagtccagacacaaaatttcctgcaaaaagaagaaaggagtctgggccaaaggggacactcagcactcacaaaacaggtgcagccccaaggcaggtgcagatggagggagggtaagggctgctttccttcaggatctgtggtttcctctgcttctaatatttcccctctgagcctctgtacatttatattttgtgcccaccatgaggtcgctggattagaaaactaatttgaaagaggaaatattctcatatgtcctaaaaacagatgtaagtattggaggcataaaaatgcataggagccgggtgtgtctgtagacactgccacccccaatgccagacccacaactagtgctggagaagggtgggagtttgatggagcttccctgatgaccccgtggtccaagctaagtccagcaaggccattggtgcctcgctgagcacagttgtccatcagggatctcccatgtgtcccagcagcagccatgcctcaatctctccactgtgcacagccattgtctgggaggagctcccaggatgggtgtctttggcacacacagttgatgggtgttagagtgcagtgcagcagctggctgcctggtctattgggctcctggatattggagggatttgaggtgcattctcagggccagcacgctttgtcaatttttatatgaaaaccatgtgatttaattcattttctcagatgacatagataattaataacacaatctgcaaacaattataattttcaactttaccccaagttcattgtttctgaattctgtgcaggatccagacatggtactgcccttctcatgagaaactgttcgatctaaactgaaaccagttgtttctcgtatactttggttctccccatgtgcagagatcttgattagagcaagtttggtactttccacgcactcaccctcacctccccagataaagagcagaagttctccttagactgagtctgagggaggagctgttcctgtaccactcagggcctgcggagacccccaggtgcagcttcactgagtcaggtgtttcactccctgtgattgctgctcaggtctaattgtggctcggaattaggacagtcttcaggttatcacaggtcaatcatattctaaaaatcatcgttatcacacaccatggtaacaattcaaggttcatttttctaacggcagtttctcttttttatttggttgcaagtttgaggaaaggaacatgtgataatactttttaacctaacctcgaaatctactgaattgttctaggagactcacaaattggacaaagtgagctctttattctcataaaaatgtgtggttttgggaatttcactgtgttgcccagaacctgttaacatcaacaactatgtttctcagcacacttctggcttgagacgtccttgcagaccctctccctcacctgcactgtctctggattccccatcataaccagtgtttcctgctagaattgtatctgcttgcccctagaagatggacaggagtggatcaggtgcatgggttgtgaagggagcacaaattacaacccactgctcaagagtccatatccagatccaagaaacagttcttacagctgagctctgtgcccagtgaacacacaactacgcatttttaagcaaaagacgcaatgaagggccttcattgtgagcctagacacaaccctccctgcaggggtgaataggagcagcagggggcattcggggcagtatgggggcttaggatgattgttaggggtcaggatgagcaggatcaaggcttcgcatcagggcaagtgcaacagggcagaaaaggggctgtagatgtgggttgttctcaccatcatatttcaccaccagacaccctccactacatctcttctaatgtgtctgagtgttgatatgattagaaaatggcatttatgtaaatactaatatgtacccatatggaggtgcatccagttgtcttctccatcttatgtggaccttgtccatcaagcactaagtccctgtatttacttgagtacctcacacattatggtcaaaacaggtagggtctccttttggcatggtctctcctcctgccttctctcttctgtcacacaaaaacacgtgaactgacacacacacagagcttcccaactttaattatgtgatgtattgaagcaaattgattagtgtgcagcttttctgctttgcctgctattcatgttatgtaaaaataagaaccatgtttttctcagcttgtcacttctctaagctaagtagcatctttgtttattatacccagagaccaaaagcgatccaactgttattcagcagcttaactggtaaacaaattgtggaaaattcacttactggaatcatacccactgctacaatcaagtaatgctggatacacccaacaccatgcttaaaatagcaagtacttgaataagtaaaataagtcagacaaataaaagtgcatacatacgattccacttctataatttctataaagtaaaaatgaacttaaagttacataaaaagatctgtagttgactggggacatggtacaagaagagaaggtatagaaaggagaaactacaggagaacaaaaggaaatttctaggataattgatttttttctctgttagtaaaagtgaggattatgtcaatatttgtaaaattgtacactttatgtaaagattcttatttgctaatttcacctcattaaaatattgcaattttttaaatgtctagtttggtagaaaaggtagtagagagagatgaataaaatacataaaaatcagagagtcctgaatacacacatgaatggaccctgggtctcactgtactttgagggagacactagaatacaaaaacataatgacaggatttcagtacatgaaaggagcttctcagaccccaggaggcatgtccaactgcgtctgggagttaactcagggagcaggcatgtcctttggaaggagccgtgacaccaagctcccagcatccattgtagccgacaccatgccaatgccaagagatctcaactaaaattttctgtggatgttgagtctgattatgccacacactcacaccaagtgagtatggaaaggatagttacctgcatccttaaggtgtctgctgagagcagggcaggtctctcattaaggtccaaagtggcttgatagggcagggaaggagactggctcagggttgttatcatggtttggtggggagcggggcagagcatcctacttgcaggaagggttttgtggggtttcaaggccaaattggcatcaaatgagggagctcctgtgatttctaactagatttaccttgtatgcttaaaaaaagagatgatggaggaatgagcctgaagttatcagcagtcaggcctaaacacagagtctgatgacttactctaaatagcaagtatacaaatgatgagtaagaaaagagacaagactccaatatgggtggacaacagccaggtctgcagaaaatgagaagactgtttataagcaaagaataatgagtaggatatggaggaggattctggtccaatgtcttgtgtggaagcttctcatgatttgagatcatcagcttattctgaaggtcttaggtcacctgtcttcttcaaaatatcagaagtgcctgatgatatgtgaggatgcgcagtttaacttcctctatttgagtagctttacaattgtgtaaaattcttaattaattaatttttttttgagacggagtctcactctcttgtgcaggttggactgcagtggtgtgatcataacatagctcacggtgattttaaattcctggctcatagaatcctcccacctcaacctcctgactagcaagtagctaggtttccagggcccttcatctacacttggccggttctttacattctttttttttttttttttaggtggagtttccctcttcttgcccagaccggagtgcaatggcgccatctcagctcactgcaatctccccctcccaggttcaggtgattctcctacctcagcctccagagtagctgggatcacaggcatgtgacaccatgccccgctaattttgtatttttagtagagatgacgtttctccatgttggtcaggctggtctcaaactccctacctcaggtgatccttccacctcagcctcccaaagtgctggaattacaggcgtgaggcaccacacctggcctcttcgtttttattcatatattccttcagcagccactatgtcttcccactgatttcttcagtttctgccttttccttttgaataaggctgttactcctgagggaagatgggaggtgggcctggacagggacttggtgcattcctctctcccctcccagttcttattggtttctccagtgtctgtagaacagtggttttgatggctttacctctgcagataatttctcttgcaatgtagtggtgatggggaggtgtgtctggatgcatttcagctgtagttgctgttttgctttcccagacagcaccatcccaaggggtagaggctggagcattttgtgatgtatccccagtactgaagaaaaaggcttcaatagcaggaggaattcctcaactgcatacactctgagaatttaaacaataacttctctatcacactcaaattgaaaccacccaatgaatatgtctactttaatcgtgtgctaacttaaatgacatttggcagcctctgtcccagaaaagattatcatctgctcctgtttatttccctgcaagtctttatgtctgttcagatttcagatatattgtttgtcctataacatcaaaaatttgatgtatatatgctaatttgcagatcagtaagtttagtatttgttataagaatagtaacatatttttatggggtgcttacatctccaagctgagaagcacctctgtgtaatactaagcaactagaaatggtacaaataccaagaagacacatagataaacagtaatggcatgctaatttatggtaataacatccatcattagaatcaatacattgttgatgctcaacatgtgtgcatcataagtagttatgtgcgagaagccacacaaataaaacacatactatgtaattcctgtataataaattcttgaaactcaaaactaaggtattaaatgtgaaggactgactcagaatatggtggaggaagaaaataattgggaaggaggaattgtagaggaacacaaggaaacttttaagtgtaatttgtttattcattatttggatggcttttggggatgcacaggtgagcacgagtggaataacattttgttttgtttgtttgtttgtttttttctgaagagatgtggtcctactctgcgacccaggctggagtgtagtggtgggatcatagttcaatgtagcctccaacttctggtctccaacaatactcctgcatctgccatctaagtagctggaactaccgttgtttgccagcaggcttggcttgagtacttattaaaccgcacactttttgcaatatttaatgtatagtaataatgtctcaataagactattacaaatcaatgaatgaataatttgttctgtacagatttatggaaaaatagacactaacatgatgaatgactgacatttatgaaaatacagctgcatgaaatgtgcttctctttacattcattaggtaaacacaatagtgcatacacatcacaccgtgctttcattacaggaagaaacatctgaaaatgtcactggggtgaaccatattgtgctgggcttggttcaggaagcagtcaggcccagtgttgtgaccttcaaccacagaatcctaaaaaataataaaagaggctcccccaaagtccccatcagttcctggactcgccatgtgtctgggccgtatcagtgcatccggagctccctggtggctttagggattccttgcttgccatgctgaggtctcgctgtagattatgttgggttttctgaggccgttttgctatttaagacccactccctggcacagagcgattccctctaaacctgatagaggttctgaactacaaataacgttaagtgaatcctggtgtgtctgaactcacatgattgttacattaagctgctgttgcaatctgtttcctcacctgggaaaagaggagccaggacatagtgagttgaggccccaggaagataactgaattctcagagggcacaaccagcatcctccttccagggagagcctaaaagactggggcctccctcatcccttttcacctctccatacagaggcaccacccacatgcaaatctcacttaggcacccaagggaaaccatcacacatttccttaaattcagggtcctgctcacatgggaaatactttctgagagtcctggacctcctgtgcaagaacatgaaacacctgtggttcttcctcctgctggtggcagctcccagatgtgagtgtctcaaggctgcagacatggagatatgggaggtgcctctgagcccagggctcactgtgggtctctctgttcacaggggtcctgtcccaggtgcagctgcaggagtcgggcccaggactggtgaagccttcggacaccctgtccctcacctgcgctgtctctggttactccatcagcagtagtaactggtggggctggatccggcagcccccagggaagggactggagtggattgggtacatctattatagtgggagcacctactacaacccgtccctcaagagtcgagtcaccatgtcagtagacacgtccaagaaccagttctccctgaagctgagctctgtgaccgccgtggacacggccgtgtattactgtgcgagaaacacagtgaggggaggtgagtgtgagcccagacacaaacctccctgcagggaggcggaggagccggcgcaggtgctgctcaggacgagcagggggcgcgcggggcccacagagcaggaggccgggtcaggagcaggtgcagggagggcggggcttcctcatcagctcagtggtctccctcctccccagcacctcagctgtccccaggactcctctttctttattatctgtggttctacttcctcacatccttgctgcaggttttaacagtcactggcacccttttttcaacaaattcccacaaggcccattttaccttcttgacaagcaaaatattctaaggcttctcactatcccttgattggcgtcatctactgcatcgtgtctttctcttaaattcatgtgatgaaaccccaatcccagtggctctgtattggacagagggattttaagagggcaaataagttaactgtggccataaatgtgggaccctaatccagtaggactcttgtccttatgagaagtggaagacatcagaggcctctctctccacatgcacacagaggagagtccatgtggggatgcgctgcatgagaaggtggccctttgcaagcctggaagaggcctctcaaaaaacttaccctttctgcacccagatcttggacgtcaagactccagaacaataagaaaattaatatttgttatttgaaatagcctagtctgtggtatcttctcatggaaagccaagtagattcagagattcaattgtgttagctccgtctcctgcatggagtagcagcccaccgaggctggacacatctctcaaattattttcataaagaaaaatagatccaagatgaaaaccccaccacatttctgctgagccattcacttagcagcagtctctgagatcagccctgggggtatgttctaggtcgtgtatctcactttccactatgagaatccatgtagataatgagaaccagccagatggagtcctgatccctgcccaccttctgcttccccccaagtgacacacggtcacagaaaaccactccagcatcaccctgtgtcttgtactctctaaaatcccactaaagctgaccctaaactaggagctatttggggctggactcattctgttcttagtcttccataaggtccaggtgccgagtagagcctcagtaaagagtgagcttcaattcccctaacccacatcattcccttacatccttgtcatgcacctgtcctctgcaggcacccagggcaggttacacaggaattgcctgaagctggtctcaggtgccctgctgagaccactggttatgcacacgtatgatttcaggtcatgcaggctcttctgcaggacagacctgtgtcctgtagagcacagacacttggtgacccagggcctcctctaataactcatacatctcatgtcagtgtatatccaggtggcccctcagtgcagcacactagggtgattaccctcacaggtggctttttcaggcggtgaacagaaaatggggtgggcacgctggtcattcccatcatcggtgatatccaagtgaattttaaataaatgaaacaaaactaacaacaaaggggaaggatatgtacctgtatctgggaggtagactgggtcccagaactgtactgggagtgggtgtgaaaggcccttttgtgtgggaagccctccagcatgagtgaaagctgaaggaatgatcactgtaggtggaggctgatggagaagctggcagggtacatttcctgaagctgttcccgggtgcgtgatggttcaatggcccatgtacatgaagaggagggctggactcatgtaggatcaaggaaactaccccatggcaatggaagaaaagaaaatggagatggacacccctggaggcagcttattagctttggtggaggaacgatgggaatttattccaatgaccccagcattttcagctaaatatgagttgcattaacagacagaattatgaagggaagggagaaggagtttatagagggaaaaagcagaacagaaaaaaagaactatgcaagtctatcaaatggcagatgacagagtggagctgatgcagctacttcattcttcccggaacctaccagagaccttggcattcctgtaaggcaggtctagtggtgatgcacttgtccactttttgctttttggagaaacgtttgaaacatcctacattactgaagaaaagctttaattagtgtaatatttttacttgacagttttattggttttgttttattttcagcaacttgaatagaatcatgcacatcatgatatttgggtgaacaacaggccacatacacgataatgatctcattaaattataatactgtattttcactgcatttcttccatacttagatatgttcatatatatacatacctaccatggtgattcaactgcccacagtattcactacacttacatgatgtacagatttgttatctaggagcactatgctatcccacacagcctgggtgtagcagggtatttcacgtaggttcacgtaaacacactctatgatcctcgcatgatgacaaattgcctaaggacacattgctcagatgtatccctactgttaagctacacatcattgtatctcatctctctccatttttggtctctgataaaattctcgtgttgtttttgcattcttctctgagctcattgaacacatttataaggtttcctttgaattttctgccaggtaatcaatatacctccttttaatttgtgtcagtttctagtgctttgctttgttacagaatttggactgctttttttctctttcattattattatcactttgtacattctctgttgctttctgctcattagaaggaaaagccatggtaaccactcttcacagaatatgctcagggcaaatgccatcacctgttagcccagtccatgatagtggtgtctcttaaaatttcatactggtccaaactttttgttgttgttgttagtggcactcagacctatagaggattttaagttttcccctactctaaattaggtggcatcaaaattcatcctgcaggcagtctctgataaagtggagaaattggacaaagttttagcatgtatatggttcataaaaataatatgagtttaaggttttctcagccagttgctacatattgatattttataatcatttctttgaatgtctctggagtttatcttttgaaaatttagatcagaatatataccaggtttgaggcttcttgtctggcttaacgatctcctataggtcagcgtgtgaaaaggcacagagtctatctgaagaggagaactcagggaagccccaaaacaacagaggagacaaaactgaggactttgaggaatctaaagcttctgggacctgcagcctccagacatgctcagcaccctcttgttatccacggactaatttctttctcttttctgagtggtattttctagggttcccgtcctccactttgacactttggtatgtccatgtgtgtccattgtgtttcagccagggacacagaaccaggaaaacatcatggcttttctagagggagctgacctgggtaatcaacagttggagtagaaagtgcctttgtccatgtgtcacaggcctaagggccatgggcaggaggtcaggaagagaggatgaccagacggctggggaaaccaggatgaacaaagccactctccttcctggtgagaaggggcatgtggaagcctggtgtccctgtagggctgaaccacactcacctgcccactgctacctgccagcgaggtgacccacagagcagcagcagctcctgagtcactcacagaggctgcctcctcctccaaaccctccagtgtatgtgcttccataagtgtgagccccagcagatcccaaagttttcaatgggttcatctagctagtgtctgtcctcagccccatccccaggctcctgccctggttggtgtccacagtgtcccagcagcggtgacagtgacagccagggcctgcactttccagagcagcaagtttggaagaatcaagtcccagaaccagcctggatttggggcaaacacacaaatttcactctgaggggaagtgctggaaagtagccttgagtcttcctcagctcacctgtggctgatcctctgcatcccatcagcgatacatgagccctccccaaccccagcgtggagctgtttcaatcgcagcaggatgggaatgtgtcttctttctggggactttttaagcacagctcttatgttcctgagatttgaggtttataaaggtgtgtcagtcacccacagagtggacctgcacaagtaagacaaggacaggatccccaggagaggcacctcatatgagacgggacaggcaggtcccatcacagacactggtcctcagaaaccctgaccagctactcaccttcccaggtcacctgtgtctgatcagttcctgtgtttgctcctgaaaagatccccatcaagggtccccaggtcctgcccccttccttgatgtgcctctgggagtggggctggctgggctgtgggtctgctgtgactttccccacaggtcagcggctcagtgcaggctgcgccaactcggtggggctgggctgtggccgaccctcccagggggagcctggatgcttctcgggggcatctgcaggatcccaggttctgggagaacagggaagccacagtgtgtgcagggccccatctccaggtgtaaagtgtttgctgtcactctgttgacaagggcatatccccaggcctaggggcactgtgggtgcacaaccaatgtggtagacacagagagtaaggcacatttccctcccattactgtggggaatctaggcactgtgtgtgtgtgtgtgtgtgtgtgtgtgtgtgtgtattaggagttttgcagtgggctctgagccccgtgattttgtaggtttagaaattatctgatgagatgttcatccacaggaaccgacaagagattaggtgttctcccaaagcccctgggagctcctggactcattgtgagtgtggactgatccattgcttccagagctccacagaaggggctccctggtggtttcatagaatccttgcttggggtctttctgcagagttcactggctttcctacggccagtttagtattgtaagagatggtgtcagcagcacatggtatcacatgtcactaaatgagcattctgagccaggacacagcatcttcatactggggggagggaaatgctttgggagcccagacaggagcctctctgcagtgcaagggctgggctgcagggggcgctcaaggcccacccatcacaggctccacccccagagcaggtgcaccggaggctggggagggattcctctcaagatctgtgtcattcttctaaaaaaaatctaaaatgagtatttgacaaagactgctgaacattctataaatatcctattcaattgtgagcatttatcaaatttgatgttgtaatgagaaccacttttatactagatatttctaaccctgctagatatcttaatagtatgcagctggaggttaagcaagcttttcttttatataaataagtgcaactttggagaaacacactcatcccccgaataagacattcatgtattaaagcctagaaatactttaaattacctctgagccattcaagtgtgtgttcacagtgaagtcctgttctagggaaaattgttctccagggggagaagctttgtcaacatagagcttagggatgtatcaggaggcacatgacctctaaggggattatagcttgaacccttagcatcctcctgttggtaatacatgtgtcactctccaatctttctcatgcagtatcaggtatgaaataggatcgctcatgaatatgcaaataactgaggtaaatatagatatctttgtgccttgagagcatcatccaacaaccacaactctcctcagaagaagcccctagaccacagcacctcaacatgtactggacctggaggatcctcttcttggtggcagcagcaacaggtaagggacctcccagtcaccgggctgagagagaaaccaggccagtcaagtgagacttcacgcactcctgtctcctctccacaggtgtccactcacaggtgcagctggtgcagtctgggcctgaggtgaagaagcctggagcctcattgaaggtttcctgcaaggcttctggatacaccttcacaagctatgctatcagctgggtatgacaggcccatggacaagggcttgaggaaatgggatggatcaacaccaacactgggaacctaacgtatgcccagggcttcacaggacggtttgtcttctccatggacacctccgtcagcatggcatatcttcatatcagcagcctaaaggctgaggacacgtgcaagaggcacagtgtggaaacccacatcctgagagaaccagaaatcctgagggaggaggcagctgtgctgagctgaggcagtgacagggacaacgtggctgcaccctttgttgacatagggttatacacatacatatatatgcacccaacactggagcacccaggtatatcaagcaaatacaattagagataaacagagagatagacccaataccataatagctggagactttaacaccccactttcagcattggacagatcttccagacagaaaattaacaatgaaatcttagactaaatctgcatgacagaccaagtggacataatggatattgatggaacacttcatccaatggctgcagagtacacaatcttttcctaagcatatggatcattctcagggatagaccacatagtagaccagaaaatttgtcatttttaattaaaaagatatcatgtaccttctctgatagtaatgaaagaaaactaaaataataagaggaattttgaaaacacatggaaattaaacagtatcctccttaattaaacaatgtgcttccaaactgaactatatgctctaaaatgggttaataaagaaacaaacaagaaaattttacaatttattgaaagaaatgataatgaaaacagcgtatgaacacctatgaaatacagtgaacatagtactaagaggaaagttcacagctataagcacctatgttaaaaaagtagacaattataacataaacatcttaggaatatctctcaaaaaaaactagaaaagcaagagcaaatcaaatccaaacatagtaaaataaaaaagttaagatcagaacgttaataaataaaattgaaataaataaaacaataccaaagatcgatcaaatgaaaagttgttttttaaaaagataaaagacatctataaacctttaaccagaccaagaaaaaaaacaaagaagaccaaagtaaataaaatcagaaagaaaactggaaatattacaaccaatagtgcagaaaatcaaaggatcattagaggctactaggagcaactaaatgccaataaatcgaaatatctggaagaaaaggataaatttagagacacatacaacctaccaagattgagccaggaagaaattgaacagatcagtaacaagtagtgagagtgaagccataataaaaggtctcccagcaaagaaaaaacccgggacttgatgacttcatcactcaattatgacaaacatttaaagaagagataatacctaatctcactcaaaatattccaaaaatagataaaaagtagataaggaagggaagaattcttccaaacttactgtacaaggccaatgttacccttatatgaaaaccagataaagccataccaaaaaaaaaagaaaactacagttcaatatcactaatgaatatggatgcaaaactcctcaaggaattcttagcaaaccaaattcaataacatatcaaaagagcattcatcatgaccaagtgtggcttatcccagagatgcaaggatggttcaacctatgcaaatcaatcaatgtgacacatcgtatcaacagaatgaagggcagaagacgtaagatcaggccttaccttgttctcctcactcaaagtctaccattagttctttggtcctcttgaccagtcctgctgtacttggtctcccgtgattctgttcccaggtcctgaaacactgggcttctgcacacctggagtctctctctttgaacatggagaccctgtatcctcagagagggatgatgcctcattgtggctcccatgccccatgcaaacaattcttccaacacagtcatgatttttcctgttggaaattgaaaggggatgtgggaattgatgtgtgtgtgtgtgtgtgtgtcctcaggcctgttgggcctgttgagaacacagcagggctctatgtacaacaggaaagcaatgttttctctataccatctattttcttataaagtgttcataggtaatcaaaaggaaatgaatcacagtttataagatgttgtggactggactgatgttgtcactcaaggctactatgggggctccaggaaaagaaacctagaaaaggataagactgtgagcaaagaagcaaaacctgggaagcagcagggagagggtgagcaggggtgactcaactggggagggataacaccacttaccacagagggtgaaaactccgtgctcagcaaagaggagaacttactcagcatttcccctaatcctccctccagaagcgcgactgccaggaaagttcacaatgtatcatctccagctgggaacccaaaagaaacaggagattttagggcataggtcctgggcacaaggtgtttccctggttcctaccccttccctctctgtccagcaaaactgcttgtttctatcacttgccttcctgtccttggggtaagaatggatgctttgacactcagcagagggatgctctttcagaggaggaatgagtttgtgttatctgatgtctgagcaggacactcacctctgggaagaggctccaagacagaaggtcgccgtggttcctgccccttatatgtgaggggctcttgacacatgcacacttttcctcaaactctgtttataccccagcaacaatgctgggtgttgtcagcctctctcctccccagatactgctctatcatcagcttgagcacagtttccccatgaaaggcattattctctctctcaagaagatcaactttttacatgtcttcgatggatgacagtttttctgtgtgagaatctagaaataagaaatggggtaatggggacaagtgagctctctgtgtgactcactaggaagtccactgttattccaggtgtcctgtcccaggtgcagctgcaggagtcaggtccaggacccatgaggccctcagacacttccctctgcctgtgctgtgtctggattcttttttttaccatggatattatttgagatgaatccaccatcccgtgggcaacaggctggaatggctggggcacagttactagactggatcatcaaggaatacacatcatgcaccctccacccaggtccatgtccccatcaacagtgactcaaccaagagccagttctctgtgaagctcagctccatgaccacctaggacacggctgagtattactgtgaaagactcagtgaggaggtgtccttatgagccctgacacaaacctgtcagggcacttaggacctccaggaagactcaagaccaccaaggggactcacgaccactggggaagggcaggttgcagtaagcacagggccagccccagagcaggtgcaggtggagatgagaggctggtttactgccagggtctggggctgcttctccatttagatgtttccttcagagaccctcccttatttcatgatgctctgcttagctgtaagtctctgaaatatcacagttttgttgtaccaggaggaaaccttctctcaggtgctaaatgtagaacaatctctctgccagtggttgccagggtcacagccctgtggaagctgaagggtacccagtgagtcttctccagtcacattcaggacaggaaccttagtggggttccctgaggagaacagtctttaggaattctaacctcagccaagagaggctgggccagggtcagtgtcaggtagaacctcacaggatttacgtctgacccttctcctgacactaaagcatgcaaatcagtatcagcactgatctggggccccttttgctcctagcccattctatttcttgttagttgtatttgttgttgattttccttttgctgttcctgatccctgtaaagtggagatgtggttcctgctgtaaaaattccagggctcaagccctttccctgcagctcaggtggggctcagactgtggctcctgcaaccacgtgggagaggctgatgggactatcttctctcccgttgctcagaaccctccagtgtgttgtgtggagactcacctgggaatgcaagtggccaatagttgtgaaaggtatgcgcttgtttggtcaaagtggaatgtggatgtggaatttatcctgtgttgtgcaaactaacacaggttcaccttcctcacctgtagtgttagaaagagtgtgaaagttgtaagaatcaaaacagagccacttgtgttaacaccctgacaaatggacctaggaatgaacatgaaggagggttcttaggcccatattcctgataacaaaaactatcataaatagactctgcttagccaccatcttggatagaagcccaccacaaccttattaaaaattacacttgcaagaacatcagctcagaaactggctgttcaaccttacactgatgccaccattgctattgattctacaactatatgataattatctcaaaacaacttttgtaacccacctcattttcacttcataaacctgtggattgacatgttggagttactgctgcatttgtagataatgataaataataaggccttttaacaatgtttgaagctgctattctctgatgtctcttctaaaataaagaatttccaagtggatgacaatgaaaaaattgttagaaatatttggtggtaaggcatctttaacatcctgttgaatgtttctgcatagcacatcaatcccttaaaatactttgctatatctgcatttaatgaatgagtctaatattgaggtgcaattgaaaatacctgggcctttgatgaatcagctcatagggtgataatgtctgggtccttgagaaagcagaccctgtgttgtaagttttagtagaagtaccttttgcaaagaaagttcatgtgtttctgaacattatgctacttttaacttaagaatgcaatatatgatttatttttacttcaaactgggtatatacccagtaatgggatcgctgggtcaaatggtatttctagttgtagctccttgaggaatcaccacaatgtcttccacaatggttgaactaattttcactcccaccaacagtataaaaatgttcctatttctccacatcctctctagcagctgttgtttcctgacttgttaatgatcaccattctaactggaatgagatggtatctcatcgtggttttgatttgcatttctctaatgactagtgatgctgaacattttttcatttgtctgttggctgcataaatatcttgttttgagaagtgtctgttcatatcctttgcccactttctgatggggctgtttgttttttccttgtaaatttgtttaagttctttgtagattctggatattagccctttgtcagatgggtagaatgcaaaaattttctccgattctgtaggttgactgttcactctgctgatagtttcttttgctgtgcagaagctccttagtttacttagatcccatttgtctattttagattttgttgtgattcatacttggttaatttttaattgcattgttttcttctgattagttgtaagtatacctgcatattgatcaaaaaagccgtttaacaaatcaaaaggaaacatttaacaaatacgtgacttggaagtattttctccaagtctgttgttgtcttttactcccttgtcagtgtgtattgcagaaaaatatgtatgtgtgtgtgtgtgtgtttacaaattaaagaaacaggtataatttcatttatccatagatcacgtctttggcattacatctgaaatctcatcataaaatatactaatagtgatttttttttccatgtctctaatctcaggccacaatctactcatgagtgtttaaacatcacctacttgattagaggactatcaccctaagatatttggaatatttctggaaggagatgtgttctttttcccattatttctctatttagtcatttattaatatccgtattggtttatgaatgtctatttcatactctgaagtaaatccatgctatattattcattttattgttcaaatcaccacagctttattatgtgcttggaactcatttagtttggatgctgcatccttacagcacacctcatcattttgtttttgaacactttcctgtttcctggtattacaatacattctaagcccattttctatattaactttttcatacatagaatcagacatttttctaaagattgcttctttctgatgttaaaatatagtattaaaataaaatttgtgatactgggtatatgtgttgttaatgtggtataagtacttttaggacctctcaaccaactggcctagtaaatgtgcatgtttatatgaactcatgtttaaggacacattgaaactatttatgtatcttatattctgtaactttattacattaaaaatgagaatacactggtctcctcacccaactatgttaccaccatatcgacctttctaggcttccttgactgtccataatcacccactgcaaagtgaggaaccccatcccatcatatgccattgtattacttagctgcacaatttcaggacacatgcattgcagcatcagaaatgtaaagctgtacccttcttggaaccatttttatctactagaatagagtgcttatgtgcagtttctttacactttaaacttatagaatttcctcattttcaaagttccttagatcagcaacttcgttttccactttcttcatgaagtcatttcaattacactgtataatttctttatttgaattctgtaaaagccaaaactacagtcaagtaaacatagagaggatattccaggaatttacagagtgggtatcaaataagttaaaaaggcaatgtttaagaagagtaaaactatttttagtgatatgcaatggttgagacatgacacaattaatttgtctaagctcataattttgtgatgaaaaatataaacctaaatatatacaatttaaaatgatgtttagcagtacattatccctaggatcaaatgcagactgtataaaattatctaataacttatttggtgaggatgccatgagacacatgcaacaaagaatgaactaattttccttatttgcatataagatgttgacattcactaaagatctttaatttaaaaaaaaatcaattttctatgtgacccaggttttttcttccagacaagcaaataacccacaggattattttctttccttgattgagaaagattttccccaaacttcagctcagttcaggcatatactgtccctaaatgggcatttaccctcagatgagtccacacacctgtcaacacgtggagtcttctgtcagacaaacacacctttactgatgtggattcttccctcagacaaaaacacatgtccccacatggacactttcctcagactaccatgtatgtccttacatttacgctttcctcagaaaacagacttttcctcatgtggactcttgtctcagacaagcaaatatgtctccatgtgaactcttcactcagataagtacacatatgtccacatttactgtttccctacacaggcacatatattcaatgttgaattgttttgtggcaaaatgatctcaagataatggtaattataaaccccctccctaataaagtgtagatctgtattttttttgttgtaacctaactttgccttattgtcaaaaacagtaatttgcagctctaaatgcaccagttagagacaggtgtccattttctctggaaatgtatttttattttcttactggacatatttgttgataatgttgctactatgaagatacctgaacagtatccacattaaagaataaaaaagagtaatgggcagaataaccctgtgcatccagacccagaaatcctttgaccctgccctcccgaaatgtagacacagaggatggatgagcagtgctgagcagtgtacccatgaccacaaacatgaagacatggaaatgtgtccccactcctcctcatgaaaggcagctcatgccctcttccttcaggccctggtatggagccaccccatgtctctgcccttccttagtgtccacaccatggggtctgcactgatctggattcccttctcatccccctcaatattagtgtgccttgtgaatcaggtccagctgtggctgttctcagtctgtttcctctgtattcacagaagtcctgtgtgatgtttactgatggagtcagaaggagaaaaatttaacagcccagcagttcactgagactgtcctgcaaagcctctggtttcgggtttactgggtgcagcatgagcttggtccagcacgcttcacaacaggaattggtgtgggtagcaacagtgagagatcatatgggagttctaagggttactctccatgagtacagataaatcaacattcccaagtgacaccctttcaagtgcagtctaccttacaaggaccaacctgaaagccaagggcaaggccgtatattacagtgagggacacaggggagggaagatctgtctgagcccagacacaaaaatctctgcagagagacaggagggaactgcgtggtagatgctgctcagaaccaccatggggtggccaggaaacaaggggtgcttaggacctctagggagcgctcaggacgccaggggggtgctcagaaccactaggggacgctcaggacactaggtggcgctcaagacaacactactgcactcatgtcaccacggggtactcagaaccaccagggggcgctcagaaccaccagagggcgctcagaaccaccaggtggcgctcagcaccaccagggggcgctcaggacaccagggggcgctcagaaacactcggggacgctcaggacaagagggggtactcagaaccaacagggggcgctcaggaccaccaatgggtgctcagaaccacaagggggcgctcaggacataggtggtgctaaagacaacaattctgggctcaggtcaccagggggcgctcagaaccaccaggggacgctcaggacatgcaggttctcttaggaggcagctgcacatcaggagcttcagaggctgtgatttcctttcagaccctggaaattcctgacctggtcaagcaaaagtcttccccaggatgtctgatttttccttttaattccatgatttcttttacctacaaaacactaacttagaacagggatgtaatgcaacttttattgctgcgtattttctgagtaatactagcaatgatctctcgggacaattattaaaataggttatttatatattttaattattaaaaataatactattattaaaatagtaaaattttttaaatcacacttgtaatcccagcacttggggagactgaggcagacagattacttgagctcaggagttttagaacagcctggcaacatggtgagatgctttctatacataaaagaagaaatagctgagattggtgcaaccagctacttaaaaggctgaggagggaggattccttaagcctgggaggttgaggctgcagtgagctatgattgtgcctccacacaccagccttggtgacagagtgagaccctgtcttagaaaaaaaaatgcatatcctcaatacagactatttccatgaatagagttttgtgtttttgtgctgtaatagtcaaacaattgtatatgttttctaactttaactcagcatatgcatggtgttttgtttctttttctttcatctgctgtttgtggaaaataaacagcactttaaaggctctgtttctccactttgtttggcttccagtgtcctgtttttcagactgtttctccaccttcccttcttctttgaaagccatttatcttcctcagtctccatgcagaaaaagaaagtccctttactttctgtcttccaagtctggtgaatcagttcccttcttttcataatcactgaagccaaccaagtttagaagtataacagttctccttagaatacgctcatctacctgcactctctgccctcctcatccttttctaggtccctccagacatcaccctcatcccataccctcccttccttaagtaccacagagtgggctcttcacctcctgctgccctctatgtgctcagccctggggctcactagtcctttgattatgaagtccaaatccctatgtgcttgcacactctcacgccaccctctaggaagctgccattgtgagagagtcctgaaaagcatgggctgggtttagtttcataatgcatattatggtcaattagttattctatttgaacattctatttaattaatagatagagttaattaaatagagttattctatttaattctattaaactattaataaattagttattcaatttattaataacaggccaatatttaaaataaataccattgcacgtttaagtgacatatttgacaataattgcatttacatacagttttaccaaaacatgtatcgaagtgtatttgtttttttaaatattggaataggcagacatacacataggaaaacattattttgtactacaatctcaaactgcaaacacaatttaaatgccattaaataattagaataatatgaaacaaatgggcatggtgttttggtgtttaaatatacattcatttcacctgatcatacttatgtgtctttgctgggctgctgtgcatgtatgtgtatttgtatgaccatgaagctttcagatacatcattaaattacataaagtgttaccatgcacttccctcttttaggggacaaagtaaatctttcagggcaatcgcagggaaaatgtgtggttggatcttccacacagagtccctaccatgacattgccaagtagagctatggaagggggctaccaacctccagaccccagaatggtagatccacaggcagcttgcagctcgagtctggaaaagccacaggcacccagctccaacccatgagagcagccttatgggctgcattagggaagtcacaaaggtagggctgcccaaggccttgggcacccacccttgcaccaggtcacaagacatggagtcaatgattattttagagccttaagattgaaggactgtccgactaggttttggccttccataaaaatctttacccaatttttgggccattttctctttttagcataggactcctcacccaatttctgacccatcattgtactttggatgtaaataacttatttttgatttttcagtctcataggtgaaaggaacttttccttgagtctgaactttggattttgaattaatgccaaaacaagttcagattgtcagggaccactggggagggattattgtatattgcaatgtaagaaagacataaggggcagaatgatgtggtctggatgtgtgttttctccaaatcttatgttgaactgtgaaccccagtgttggaggtgaagtctgctgggaggcatggcattaggggcatatccctcatgagttacttcgtgtcatccccttggtgatgaatgagttatcagttcacatgacagctgattgaaagagcctggtaccactcccttctcttatcttcccccctattgtcatgtgacactcttgctccccttcatcttctgccttgactgtaagctttctgaggcactcagcagaaacagatgtcagcaccacacttgctgtacagcctgcacaactgtgagccatataaaacctatgtcctttataaattatccagcctcaggtatttctttacaattcaataatggacgaacagaagaagtatttaattgtgcagcaaattaggggtgtggaatcattaaaatggacttaacgcctgtagaggtaaagacacaagagtctctctctctctctctctctctctccttgaacccttctctgtctttacatacacacacacacacacacacacacacacacacacacacacacacgctccacgtgaagatgtcatgtgaccaaatagcaatatggtggctgctatgagccaacagtagaagcctcaaaataaaacctatcttgccagcatgtttatctttgaatttccagaattgaggaactgagataaaattaaggttgtgtaagttaccaagtatgattgtttttaatgtttgaactgactaaagagaatttgggatgaagaagtggggttctgatgttacaattatttcaacactgtggaaagtgccttggaattgggttatgtgtaaaaggctggatagttttgacatgcataaagaaatttatatattaagtgtcattctgatagattaaaatgagtagagtgctattggaaactggataaatggtgatctttgttataaagtgacaaaaaaaacttgtctagactatgttgtgatatttagtaaaagagaactttgagcagcaaaattgaatatttagctgagaacacttctaagtaaaatgttgaaagtgtagtttggtttctcctgggcatttataataagaaatagatgaattgaaaatgaaattataagggagaaaatatccaaaacttaaaggcttggaaaattctcaatctatctgtgttgcaaaaatcagaaagtgcgttctgaagagaacagtgagtatgaggctgtaatatcacttgataaagaatttatggtattaaaagagaataaatgcaggttttaaagaacaaggatggagatgagacaaaatggacgaatactgtcagattcttcagatttaagaggatggagctacttggttgcaaatgtgcaccattcttccagaacaaagaaaaataaaccttgaatttatttagaagtaatcatgaccactaccttggtttcaacagaccagaccatccatgcttaaaaccttgaggaaaagacctcctaccactgcctggaacttaggaactcccagtgagccttgtgtgtagggctgcatggggtctttgggatgggaccttaacccagcagttacccattggtgcctctacttaaagcattggaattaattctgctgctgcaatgagctgggaaagaagaagcttggcccagagaagattccacttgagccttaaggtctatggtaatttgttttgttatgtgttgtacttgctggggacacatcacccctcctttcttttctatttttctctttgggggagaaaatgtctattttatgcctaactcaccactgtattttgaaatcaaataacttgtccagcgctatggactgaatgtgtatgcaactccaaaattaatattgtggaaccctaatccccagtgtggtgtaattggggtgtgggccatttaaggggtgatcaggtgaaaaggttgaagccgtcataaatgagattagtgctctaataaaaagtcacgggagagcttttctctcttgcttccctgtcatgagatgatacgataaaattacggccatctgcaattcaggaaggaaacctttacatacacatgattggctgtcttgggcttcccagcattcggcactgcacagaataaatatgtcttgttaaagtcatgcactttatgacactttgttaaagcagccccaataaaataagatatctggttttactggctcagagttggagagaaatttgtttcagaaataattctacctcaaatcttactcatgtatggtttagttaatatttaaattatgttttaaacttgtttagagttgatgatgaaatgagttaagagtttggggactgttataatcaaatgaatgaactgcgaatgtgtaaatgccatgcatttgggggatggtcttttctattctgggtctttcatgcctacgtgtgaattgaaggattgcttttcttatttctgtgaagaaggccattattattttgatagataatttatctaatctgtaaataactttgggtagtatgaaaatttcaatactattaattcttccaatccataaatgtggagtatctgggatatatgtcctatttatgtgtgtccatttcattttctattaccaataatttatagttatcctctagaaatctttctcttatttggtaacatttattcctaggtatattttgcagctattgtaaaaggaaaggcttcatggatttcattctcagatgttttgctgtcaacatatagaaatgccaccaattattgtatgtagatgatgaatcttacaactttacttaatttgcttatgaattctaatagtttgtgagaaggctttagttttctttttttaatataagatctttttgtctgctcacaggaaatctgacttccacaattccaaatttgaggtcatttccttttactgttaactaaatactctggctagcatttcagtactattctgaataaaagtgataaaaatggttatttttgtcttcttccacttcttagatgaaaatttcccggtttttccatgcttcgtgtgatgaaagctgtgtttttctcatatatgcgctttattttttgagatatccttcttgtatacctaatttttgataatttctatcagaaatgaatgttgaattttattctatgattttctaaaatatcttgactacacaataacacagtaatatgcaggtcaatacatatcaactgaatttcacttaatatcatcccaacttctaatatttattttttagtattagaacatgcctgtttccatattatatttgctcacaggtattggtacatattttagctaatttgtcattattttactctaagaaataactcaaaaaatcatttttattatgaattgaaaggtaacatcggcaaaattagcccaatcttaatctttcccagactttgaaacattattgaagacaatgagaggggaaagtcagctttagttgagcttctaagaggtaagtgaggtaaaaacccagggcttattggctacgactttgaatgttactgtcttcttttccataagccacatccagaccattttctaaatctaagaaaactaattttatctcactgcttcttagtcttgtttcctgcagctgacaaccaaaactgtcagcgatagagcccagtgtaaatcaccagcctttaattattgcagaactatgattttacaacaacattgtgagttacataatgatcctactttatggccgcggtgcaaatgcttaacttccactaaatcacagagctcagaatggctagcatggaggtgtatatgtatatgtgcattgttctagaaatttccaattactgtatattattgtttgcagtaattaggtcaatctgaactgacaaaagtctccatggccttataagcacagagaccacctccacggcaggtggaaatcaaggctgggaacagtctaccagctgctcccctgggattcctccaattaccctgtttaaagcctctgctcactcatgcgctggaagagggatgtcagagatgcagtctactcttcctaaagggctgacagggcataaagacaagactgattatccatggaacattcctataggaatgcacctatgtgcagacacactaataagctgtgtgtcttgcagtgtgtaaatggctgagatgccatttacacttctttacacaatacatttttaaatgttttgttgatgtattctctatcattcaaaaaaatcatcactttccccctaaacaaagaggatttttatcagaacacttatgggaagccccttgctctcccagattcccaccctcatttctcctgaaggaagaaagaaaaccatctctattgatttccactctcatcctctaggactaaaaccagaaagctgcatgctccctgggtgagccttagagaagaccctgtctgtaggagcaggaatctcagagccttggctgagaggcatggtcctgaaatgagatggagtcccccatggagatcccacgtggacgcccacacctgagggctcactgctcctcaccacagatgcactcccctactgagtcctgagacctgagtgcaccccatagagtaggactcagatgagggaatgcaaatctccaccagctccaccctcctctgggttcaaaagctgagcacggggcctcgctcagtgactcctgtgccccaccatggacacactttgctacacactcctgctgctgaccaccccttcctgtgagtgctgtggtcagggacttcctcagaagtgaaacatcagttgtctcctttgtgggcttcatcttcttatgtcttctccacaggggtcttgtcccaggtcaccttgaaggagtctggtcctgtgctggtgaaacccacagagaccctcacgctgacctgcaccgtctctgggttctcactcagcaatgctagaatgggtgtgagctggatccgtcagcccccagggaaggccctggagtggcttgcacacattttttcgaatgacgaaaaatcctacagcacatctctgaagagcaggctcaccatctccaaggacacctccaaaagccaggtggtccttaccatgaccaacatggaccctgtggacacagccacatattactgtgcacggataccacagagacacagcccaggatgcctcctgtacaagaacctagctgcatctcagtggtgctccctccctacctctgcagaacaggaaagtgtgactgagatgccatttcctgccagggcttgtgtttcctataccaaccagactcagagccctgtctgttttcctattctgtactattaaatggcatgttccctgttagtgattcacgcaagcagaggctgtatcctgtttgacaaagattgagcatgaaagattcccattacctgggccacatgcatcactgatatgtggccacttatttcttgagctcatatccttccaaggggctgaatacaaatatctataacataggccatcttaaactgcaggaagtaatgttggagaagaatgtggagataaaagagcaggatgattaattaaaatccagataccatctttttttgcagagaaaaatttacactaataaagtaattttatgaaacaacaagaaagatggaatgtgtcctcatcatggagtgtctcacttgcagtgcacaaataaatttctaaaaattttatagggaagatgtgatagatgaggctgatttccacacagggagtgattaaatacccaggtaagtataaaatccaacacttggaaaggaaaatgcctcagcttgacatcagaaacccagctcagtaagtctgaggagcaatgcggaaaagaaatgaaaaattcgacaacacttttcttatgaaatccctagctcatgtttgaacacgaaaacagaattgtccacaattttaggacagccatcgcatgacaacaaaccactacaatgataggagcatcactgagtcaacggagttcaagcagtgagcagatcagtactgaggccccaggagaaccaaggctctttggtacattttacagaacccagaaccgagccacataatctatggccaagtgatctttgacaaagttaacaaaaattaaccaacgtatacaccagggaaaggacaccccattcaataaagggtgctggggatattggatagctatatgcacgcgaatgaaactggacccccaccctcaacatgtaaataattaacacaaaatagattaaaggtttaaatgtaagtcttcaaactgtaaatgtattcaaataaaacaccaggacaactcttctggacaaaaagcaaacaatagacaaatgggacttaatgaatctaacaagtttcttcacagcaacagagtgaacagacaaagtgcagaatgatagaaaatatttgcacactgtgcatctgacagagtactaatatacagaattaacaagaaactcaaaccacaacaacaaaagaaaacaagaaccaaataaccccattaaaatgagcaaagaacatgagtagacatttttgcaaataacacataaaaatggacaatagatatataaaaatgctcagcattactaataatcagggaaatgcaaattaaaactagtgagatataccattcacaatggctgttattaaaaagtcaaaaataacagatgttggagaggatgaaatgtaaagggaactcttagacactgttgatgagaatgtggacgagtacgacctctatagagaacagtatggattcagtatgatattgactgtgcatttgtcataaacagctcttattattttgagatacattccatcaatacatagtttaatgagagtttttagtattaaggggtgttgaattttattgaaggcctttgctgcatctattgagataatcatgtgttttttttccattggttctgtttatgtgatggattatgtttattgatttgcatatgttgaaccagccttgcatcccaggtatgaagccaacttgatcatggtggatttgaaaaccggcacaagacaaggatgtcctgtctcatcactcccattcaacatagtattggaagttctggccaaggaaatcaggcaagagaaataaataaagggtattcaaatagaaaaagaggaagtcaaactgtctctgtttgcagatgacatgattatatatttagaaaaccccatcatctcagccccaaatctccttaagctgataagcaacttcagcaaagtctaaggatacaaaatcaatgtggaaaaatcacaaacattcctatataccaataatagaaaaacagagagccaaatcatgactgaactctcattcacaattgctacaaagagaataaaatacctaggaatacaacttacaaaggatgtgaaggacctcttcaagagaactgcaaaccactgcccaaggaaataagagagggcacaaacaaatggaaaaacattccatgttcatggataggaagaatcaatatcgtgaaaatggccatactgcccaaagtaatttatagattcaatgctatccacatcaagctaccattgactttcttcacagaattagaaaaaaactactttaaatttcatatggaaccaaaaaagagcccatatagcctagacaatcctaaggaaaaagaacaaagctggaggcatcacgctacctgacttcaaactatactacaaggctacagtaaccaaaacagcatggtactggtaccaaaacagagatacagaccaatggaacacaacagaggtcccagaaataatgccacacatctacacccatctgacctttgaaaaacctgacagaaacaagcaatgtggaaaatgatcccctatttaataaatggtgttgagaaaactagctagccatattcagaaaactgaaactggatcccttccttacaccttatacaaaaattaactcatgatggattaaagacttaaacatgagacctaaaaccataaaaacccaagaagaaaacctaggcaataccattcagtacataggcatgggcaaggccttaatgactaaaacaccgaaagcaatggcaacaaaagtcaaaattgacaaatgggatctaagtaaactaaagagcttctgcacagcaaaagaaactatcatcagagtgaatgggcagcctacagaatgggagaaattgtttgcaatctatccatctgacaaagggccaatatctagaatctgcaaggaacttaaacaagcttacaataaaaaaaaaacaaccccatcaaaaattggcggaaggttatgaacatacacttctcaaaagaagatatttattcagccaacaaacataaaataaagttcaacagcattggtcgttcgagaaatgcaaatcaaaaccacaaagagataccacctcacaccagttagaatggcgatgattaaaaagtcaggaaacaaaagctgctggagaggatgtaaagaaataggaacgtttttacactgtggtcggtagtgtaaattacttcaaccattgtggaagacagtgtggtgattcttcaaggatatagaactagaaatgccatttgtcccagcaatcccattatttggtatatacccaaaggattataaatcattctgctataaagacacatgcacacatatttttattgcagcactgttgacaataacaaagacttggaaccaacccaaatgcccatcaaagatagactggataaagaaaatgtggcacatatacaccatggaatactatgcagccataaaaaggatgagttcatgtgctttgcatggacatgggtgaagctggaaaccatcattctcagcaaactatcacaagaacataaaaccaaacaccgcatgttctcactcataagtgggagttgaacaatgagaacacaaggacacagggaggggaacaaacatcacacaacagagcctgtcggggagtggggggctggaggggatagcattaggagaaatacctattgtagatgatgggttggtgggtgcagcaaaccactatggcctatgtatacctatgtgacaaacctgcacattctgcacatgtatcccagaacttaaagtatagttaaaaaaaaagagagagagagagaaaggaaacagtatggagactttccaaaaaatgagaaacagtactggcctttattctaccaatcccactactgggtagctacccaaagagaaagaaatcatatttcaaaaagatacccacacttctatgtgtaccacaaatctattcccaatagcacatatgacaacctgagtgtccaccaacagatgattttataaaagaatatagcatatatgcacaatttaatactagtcagccacaataaggaatgaaactgtgtcttttgcagcaagatgcctagaactgggggacattataattagtgaactaactcacaaacagaaagccacatatcacacattattacttataagtgggaggaaaacagtgtgtacacaaggatatggagagagggattatggacattggagacttagcagaatgggagggtaggagttgggagcatgatgaaaaatcacctaatgggtacaatgtacgttacttgggtgttgggtacactaaagccaataccactgtgtaatatttccatgtaacacagttgcacccatagcccttaaatttatacaaataaagataaaaacaattacaatttaaaatataaaattattaatagttgaccaaagatcttgaaaattaaaatttaaatcatgatcaataaatgaaattaatatcagttgaacttcatttaacttaaaatccttttgtactcaagtgattttaagaaaatgaatgtcaagttttagatgaggagatttgcaaatcatatcaccacctatgtaattatagtaagaaccctcaaaactcaacagtgaataaaagaagaggcaacccatggataaaataggcaaaggtttgtgcaggcatttcattaaagaagatgtacagattacacataggcatataaacaggatctcaacaggatttttcatcacagaaattcaaatcaagaccacaataagatacccaaacaccctttttagaatggctgaaattaagaagaaagatggatcataccgatgctggtgagcataccaggtttctagagtctaaaacattgctaatgggaatgcaaaatgaaacagctacacaggaaaataattcttagtttcttgtaaaattatatatgcccttaacacattacctaaaaatccccctcctgtaatacagtaatacatggctgtgtattactgtgaaagaggcatagtgtgaaaacccacatcttgaaaccctgagggagaaggcagctatgctgtggctgaggagattacagggattatttgattaaagacttttttagaaagtgaggttaaatcagccgggcgtggtggttcacacctgcaatcccatcactttgggaggccgaggtgggtggatcacgaagtcaggaatttgagaccagtctggccaacatggttaaactccatctctactaaaagtgcaaaaaattagccgggtgtggcggtgtacacctgtaatcccagctactctgggcgctgagacaggagaatctcatgaatcggggaggctgaggttgcagtgagccgaaatcgacccactgcaccccagcttgggtgacagtgcaagactccgtctcaaaaaaacaacaacaacaacaaaaagcgaggttaagtcattgaaaaataggaaaatataaatgtgtatgcactctaattatttgggaaattttccatacaacttgtattctgtaaacaaaattcagggagtggaaaacaaatcaaattaataaaactgatataagaattcctctgaagatattagtgtgagcactaacacacacttttgaatgggtgttgtaaatattttggaacacacctcttaggtcacattttaattctacatttatgtaaattatataaaatatcgaaattttttaatgtctccattttgtgcagttataattttggtttcatgccagcaatgcatgatagattccgttcttccacatcctcgttgccatttggcactataagcattgtgtattttaaccattctaatctattggtggtgatagctcattgttgtttaaatgcacatgtctctaaaattttatatttaattattttatataattgtgatgaagtgtttgttatggtatttggctcatttttgatagcattgtttatttttgatcagttgtaagtttctttacatacccattatataagtcacttaaaaaagtacttagctggtcatgaaccccaggatgagatgcagactgtatagaaatctctagcaatgttactcagtgtgggcagggatggcatgagatacggggaataaagaataaagtaactttctccatttggatataagatgtgtccattcactagagagttttctttcagaaggttcccatgtgagccagtttccttcctgacaaggaaatcacccagaggattctcataatctcttaagtgagaaaagttttcctcaaactccagctcagtctagctcacactgtctctaaatgggcaattactttcagacatgtacacacatctgtcccaacgtggactcctccctcagacaagcacacacattgcaatgtggactctcccctcagaaaaccacacatgccccacaatgactccttcttcacataagcatatatgcctgatgctgaactgctgtgtagcaaaattagctcagaatacaagcacttatggactctagccataacaatgtgtagatctgcattttattttaaattctaaatgaacattttgccttcttgttaagaacagtggtttacagctctacatgtagagactacaggcagatatatgtttcctctgggaaaagtttattttcatgtatttactgggttattttgttgataaacattcatctataaagacacctgaaaagtgccctcattagagaaaaagaaagtgtagtttgcagattaactctgagcatccaatcccaggaatcctttgatctgccctccctgaaatccacaggcagaggggggatgatcgctgataagtagcaaacacatgtccacaggaagggagacatggaaatgtggtcactcccacactcaagaggagcagctcatcccctgtccgtagtggtcctggtgaggagccaccccacacctgtgccttcctcagtatccacaccatggggtctgtgctgatctgggcttcccttctcatcactctcaatattagtgtccttgcggatcaggctcagctgtggctgctccagatgaggctgttctcagtctgttccctctgtgtttgcagaagtcctgtgtgaagttcaccgggggagacagaggaaataacggtgcagccgggggctatctgagtctctcctgcaaagactctggattcaccttcactgattgcagcataagcttggtccagcaagctccaggaccagggttgatgtgggcagcaacagggagaaattgaagaggaagctctcagtggtgccctccatgaatacaaagaatcttcacagtccccaggacacccttacgtgcatggtctcactgatatctttacttcttttatcacttttgttatgtaaatcacaatgaatagtgtattcctcatctattatacatttgttaagtcttttttggtgtctttaaaaaaactgataactttatagtatgtaatatccttaagtcctgaaagtgttttttgatgtctaccttgtcttaaatttatacagctactatagcttttcttggttcatgttttctcatatttatcttttctatttgtgaatatgtagagaaactttcttgtacatagctaatagttgtgtattgcttttttattttggcagtccttaaatattctaattttttatgatactttaagttttagggtacatgtgcacaacatgcaggtttaaacaaacaacctcatcaaaaagtgggcaaaggatatgaacagacacttctcaaaagaagacatttatgcagccaaaaaacacatgaagaaatgctcatcatcattggccatcagagaaatgcaaatcaaaaccacaatgagatatcatctcacaacagttagaatgacgatcattaaaaagtcaggaaacaacaggtgctggagaggatgtggagaaataagaacacttttacactgttggtgggactgtaaactagttcaaccattgcggaagtcagtgtggcgattcctcaggtatctagaactagaaataccatttgacccagccatcccattactgggtatatacccaaaggattataaatcatgctgctataaagacacatgcacacgtatgtttatagcagcactattcacaatagcaaagacttggaaccaacctaaatgtccagcaacgatagactggattaagaaaatttggcacatatacaccatggaatactatgcagctataaaaaatgatgagttcctgtcctttgtagggacatggatgaaactatctattgcttttttaaatcaactataataaattctattttttttttttgagaaggagtctcgctctgtcgcccaggctggagtgcagtggtgcgatcagggctcactgcaagctctgcctcctgggtttatgccattctgctgcctcagcctcccgagtagctgggactgcaggcacccaccaccacgcctggctagttttttgtatttttagtagagatggggtttcaccgtgttagtgaggatgctctcaatctcctgaccttgtgatccacctgcctcagcctcccaaagtgctgggattacaggcatgagcaataaattctatttttaaaccaacaatatttttttccgttaatttttgtttaaattaacattttgtaatgatgcttatttctctattaacatggtatttaattacctttttataaatattgtatagttaccataagatttacaataaaaattgtatgtaattagattctaatgtaaatcctgtgatggccttgatatgaagaacacagatagtgtaactgtgtgctttgaattcctccttctcgccactctttcttgtttattctgtttgcacttacatatgctgtaaaatagaatatgtaattttttattactttatacagttatatcttatagcaattacaaatgttaaagagtacaattcatctagatttttccatttttacaatctttatttctttgtagagatttctattttgagtgcatatcacatggctactcgcagagaatctttgtaaaatgtgccctgaaacatgaatgtgctgacaacacatattctccagatctttttttctgacagaattttatttgccattcacctttaatgaaattttaatgcatgtagaatttcagtttgcatttcacctgtaatttattttcttgtaattattattagtttttcctggagatgatcacacattacattctgctgggcctttattaaccatgtttctgcgaacctagtcaggcttgggtttcaagtgtatggttgccgtggctatcagagttgaaatcagcttctcctgttcacaaaaacttcaggttcctctggtgatacctgcgtttgtgtccctgtttggctttggatcttcacatttcattctccccaaagaaaggctgtctctttcagctgtggcaggtgcatcctgctgacacatttacttggtgactttttgtgggatgaaggggcttggacacaggggcacgttttccaaccttctggctgagcctccttcttagctatgggtggtgagactggctctgatgcatgatcttccaagtgttcctgttccttcccttcctcagtgtcacagtgtctcttcccagtcatgctgttttttcatcagtgtcctcagcttctgacccactgtccttaccccacagattctggatttcattcctcaggaaacagacgggaggtgattctgggtagagtttccctgatgtcctctgtttccttgtgttctagttgattctaccagtgcccacaggacacaagatttaataaatgtctcctgcatataatgaagggggattcagcattgaacggagctactgttcttcctccccagtcaacaccacaggacagcaggtgggtgagttgtctggggatttccccaattctgtaggaaaagcctgcaagtgccaggagtttcacactctcacaccattagcacacacgtcttcaagcaactcattaaacatttccaggttagctttttcctatcttcaataccatgccatgagtggcacctgccccaggtactctaataaacgcaccctagttctctctgcgggcccctattttctcatatttcagggatttttttctctgtgacatcaactcagatatggtgaggggtttattttttgtaattcttcatgttttttgttaacgaggtcagaataatatcattttctcaatttttacattctaacgcttagtatctgatttctaaataaaattcagaaactaagacaacaaatgaagtatccattatttggtgcattgttaaacaatttgagaaatattcatgtactgaaatagaatgaaccactgaaatcaaggcatgcctcattcacataagaacatgagggcattatcaaataattttgctgagtggaggaagctaaagaattcaccatcaatttcatgtgatttcatttgtataaatcacagaagatgcaatattctaaattaacatagagaagatctgaatttctctgaaaatagggtgggcagagtaacaacgtggtgaaataaaattatagacaagttagataaaaaaattagaggttaacttaattgctaaaacatgattgaagtgctgattcaatgactgcacacatatatcaacattttccaaatgcttcactatcaatttgatttcattattgattgtttttttaataaagcagtaataaaaatgaatatattggctgagaaagagcaagaaatggataaataccgacacttgaataatcaaggactcctgaaaatacacacatgtgaacactgattgtagatttcaggtaaacactagaaaaggcaaaattacacaaagttgttatgacaggagggacatcctgaaaacctctctaggcatgtcccacaccaccctggagctgtctcaggggagcagtctcctccagtgtttagaggcacaggcacgcataatagggctaactctggccagatgtgtgatattggacacattgcacaactgctctgttctgtatgtaatttatcttctctacaaatgtaacattgacagttgcattaaatatattctgcaaatatgtaaaagttaaataagctgatgtctgctaaatgattaccaaggcacaatcacataatctgaagttatattttccagagtgataggattacctccagagttttccaggacactctcatctgctccgggcactgccttctcctcagccgtcccacccctgagcttgctatatagtaggagacatggaaatagggcccactctctgctgataaaaaccagcccaaccccgaccctgcagctctgggagaggagcccagcccccgaattcccaggtgttttcatctggtgatcagcaccgaacacagaggactcaccatggagtttgtgctgagctgggttttccttgttgctattttaaaacgtgatctatagagaactagagatattgagtatgaatggatatgagtgagaaacagtggatacgtgtggcagtttctgaccggggtgtctctgtgtttgcaggtatccagtgtgagatgcagctggtggagtctgggggaggcttggcaaagcctgcgtggtccccgagactctcctgtgcagcctctcaattcaccttcagtagctactacatgaactgtgtccgccaggctccagggaatgggctggagttggtttgacaagttaatcctaatgggggtagcacatacctcatagactccggtaaggaccgattcaatacctccagagataacgccaagaacacacttcatctgcaaatgaacagcctgaaaaccgaggacacggccctctattagtgtaccagagacacagtgaggggaggtcagtgtgagcccagacacaaacctccctgcagggccatgcgggtggtttcctttctcagctgcaggaggcgggcttattgttgcaggactctggagacttattaggttgtgatattttactatggttatttatcatgaacttttttattgggaattgtgttttattaatttttattttatatgtaaggttatttttttaaaatacataccttcaagaaataattcttcctaataatttgcacttgttctttttagagttttgttaacatctgttgatatcagctactacatagctatagggacattaatttacatctatagacatatgtgtaaatacacaaacttatacatatatgtggtcttttatatttaatgttataataaaattattataacaattataaaatacatcctaaagaatgaaacatatatagtaatccatattcctttcaatcattgcctatagtttacataaattgatgtctatttgtaaccttaaacatagtgtattggtcattttcaaacatccaagaacaaatttcaaatgtccttgtcacacacacaaaaataaaaatttgaggatttgaggtgatatatatgtcaatcagctcgattcaattattccatattgcattcataaatcataacatagctttattcactataaatacatacaaccaaaatttctcaattttcaatgaaattttaattatacatattttatctgtcctaggtcatgaatgtttttctccctgtccggatgtgattagattgtcctgagaaacaaattcagcttcctgcctcctgaaggcttcaggaagcagctcctagatggggtgaagcaggcaacccgtgtgtgtccacaggacccggagcctctctctccttggattaggccccctcctcaggattacagggctcttcagttttctcaacatgctgttataccagagaagcacaaaacacttaatttcattatatttttcttcaatttttcaaaacaacacaaaggtaataattttaacaataaacatattacaacctactatacatgagacccttcctgtgcttcgaggtttcttctcaggactttgtatgtattacatgttttcagtttttttctgagatggaatgttgacgtctccttattacagattattcttttaatttgtctcttagaataattttttccagagctcctgcccgcccgcgcctggcggaatggagcggcgccagggctgagccaggcgcgcaggggccgccgcacgtgccgcgcggggagcggatgcccagcgggcggagagccagcgccagaggccgggtcggagcggccgctggagcagcgtcagaatgggagaacagcccatcttcaccccccgagcgcgggtcttccagattgaccccaacaccaagaagaactggatgcctgcgagcaacaggcggtcaccatttcctgtttctatgatgtcacaaggaacagctatgggatcatcagtgtggacagcgccaaggtgaccataaacaacacaattacacagaatatgaccttcaccaacacgtcacagacgtctgggcagtgggccgacagcagagccaacacggtgtttggtttggggttttcctctgagcagcagctgacaaagtttgcagagaaattccaggaggtggaagaagcggccaagacagccaaagacaagacccaggagaacatggagccctcgagtaatcatcctgagaatcagggcgtggagccccatcttctactccggcatccagtgtcaacgggacggacgatgaaaggcctctcaggccgctgcagccgacacgcacctgcagtctgggaaccacaagctgaaggcggcctcgacgcagagctgcccacgggaagaggtgggagatggagctgcagacccggcgggagaccgacttccggctgcccacggcgctgcaggagtcgacggccagtgcggagcagaggaagaggccgtgagtcagagtgcgactgtgtctctgagaagatggaggcggcagagagaggatcaaaacctggaagataaagtgcgttccctaaagataggccctgaggagagcaaatcccgacagcgccacctggaggcgcttcctggtggcgctggaccggaagatccaggcctgcataacttccgcccaggcctcccaggctgggcaccaacaactagggctggcagaggcccgggatccccaacgtgagtcctaagtatgtgtgcgagaccagatggcgctaggacgttccctgtgtgcgttgcttctgtaaatgcaggcgccgtgtgtcgtgtttccaaaccagttgtgccatccactcactcctttccagaatagaaatctctcgcttctctggccttgtgaggttgtggacaactggaagattctgactgaggaaaccagaaccaggtctaccttcaacatttacgcagtcaggccagggatgtttatatcgttcataagggttgttggaaccatatgaactgaaaaaaagcattttctcatccaaatattgatattctttacaccaggccatcgggctccttttatccgatagcattcagagtatttgaaggtcctccaggtgccagccttgggggcacagggagaacaacattcctctccgaaaacatggggaagctttaaaataactgtttagtggagacttgcccagagatggaaaacaggtttctggtgagtacattttctggtttgggaatcacctgcatccccgatcctgccccgtgccccccagtttgtatggttgtgacaatgttccatttctttgttttaatttctgagcagttgactgtggtgcgggaacagcacacagtgagggtgcctagcacaatgcctggcgcaaagtaggtgctttataaatatttgttcaattaaaaaaaaagagggaggctgaggcaggagaatcacttgaagctgggaggcggaggttgtggtgagccgagatggcgccacttcactccagcctggcaacagagcaagactccatttcaaaaaaataaaataaaataaataaaataaataaataaaataaaaaatattttttccaagccccactcaaaaccatggtattgttagaggtgtaatagttggaccaacattgaaaatacattccatttagttcatgggcgtgcaaatatccttttttctttaaaaattgttctcagttgtaatattacaaaaaatattggtaatttataccaatgacacaggttaaaatgttgtataaataatttaatgacgtttgattggaaaaaatacatgtgccacatgtcgacaattttttccttctctatgaaatatatactcattaataagtttcagatgttacagttatctttttgatttctgggatttaattttagtaggtatacttgaatgcattttattaattcctataatgatgttgatatttcatgtaggattttaatactaattttactatttactgaattttaaactattctacatgttttatttatataagaaaaaaattacatatgagaaaaaatgcgtagacctgaaatgtatcactagagagtttctgtcaaatgtgaatacctttgttcccaacacctaaggtagcctgaagagcaagtccttccccacaacatgcgtctttttctgtgcttgcggtcagctcctgcatggggaaatgttttgatttctgacactatagatccattttttttctgttttgaactttatataaatgcaatcaaacattttagaccttaatttggtaatgggctacattgctattttttgaggttatttcctgctatttaaggtattaaattagatcaacatattatcatttattcaagtaatggactgactctgatatgaaacctcaaagttttcacatatatatggagagagagagagagagagagagatgagggagagaggttttatatctgagtcagtctgttaaataagtaaatgacagtattttgatttattttcctgtaaatcgactttaaatttgtttccagtttatgaatattataaacaaagctgttacaaatgtcttagtgtaagttttcctatgttgtcttccttttattgagaaaatatgaagtatgtatttattataagcttaaattttttcagttttattgaggtataattgaaatattttaataatgtatagctttaaggtgccccacttgacgttttgatgttgtattagtccattctcacggtgctataaaaaatgcctgagactgagggatttgagaaaaaaagtgtgtttaattggctcacggttctgcaggctgtacaggaagtgtagtggcttctccttctggggagagtcaggaaagttaggatcatggcagaagacaaaggggagcaggtgcgtcacatggccagaccaggagccacaggaagcagggaaggtctacacactgttaggcaactagatcttatgagaactcacacactgtcatgagaacagcaccaggagtttgttctaaaccattcatgaaagacccaccccatgtcccagtcatctcccaccaggtcccaccttcacaattgaggattataatacaacatgagatttggggcaggacacagatccaaaccacatcagatacacattgtgaaatgctcatcatggccaaggtaatttgtatatccattttctcatggagctaccattttatttttttaaaatgtactacatgtgtgtgtatgtgtgtgtgtctcatgagaacacctacgatctacccgttcagcaaaaatcacatttacaatacagcattaaatacaagaacattgcagtacattagatctgcagaactcattcaccctgcacaactggacctctacccttcgaccgacatcatctgatttccctctcctcacaggcctgggacccactattctactctctgctttcaagagcttgaatattttagatcccacatgtaaatgagatcattaagtctttctgcatctggcttattccactaagcatcatgtcctctagccccatccctgttgttgcaaatgtcagaatttccttcttttcaaagcctaataaaattcagttttctgtgtacacattttctttacacattcatcaatctgtggtcattaaattattttacaaatctacactattataaataatcttgcagtgaacatgtgtttgacataataattttatttcttttgaatatatgacaagaagtgggatcaccagagcatatgatagctttatttttcaatataatgaataaccaaacctaccacaccatgcttttgaagtcttagtcatattttatttgcctaggccaatgtcccgaaaaatttctcctacattttcttcagtttgtacatttaaatattgaatccatattcaattaatttttgtctatggtgaaaaactagaagtctagttttattcttctatgtgtggctgtctaagtttttcagcaccacttactgaatagagggttgtttctccattgcatatttttgtcagttttgtcaaagaacaggtggttgtagaaacttgtctttatttcttggctgtctattcttttacattattattattgttattgtttttagtagcagtaccatgctgtctttcttactgtatctgtgtagtataatttgaaatcagggaatgtggtgctttcagctttggtctttttccttgggatttcttttgctattcaggctgttttttgattccatatatatttaaggattttttttaaaacatgtaatcaattatattggttacttgataaaaattgcattgaatatgtatcttgctttggacagtgtattagtctactgtgcattgctataaattaatgcctgaggccaagtgatttacaaagaaaagaggcttatttggcttacagttttggaggctgtgtgagaagcatggcaccagcatctgcttcttgtgagggcctcaggaagcttacggtcatggtggaaggcaaaggggaagcaggcggtgtcctgtggtgagagggggcacagaagaggggaggagggtcgctagactgtttttaacaatcagatttcaaattagctaataaagaaataattcactaattaccatggggttgataccaagccatacctgaaggatcttttccccacaatccaaaaactcctactaggacccacctcaaatattttggatcacatttcaccatgagatttggaagggacaatcacctaaactgtagcatttcactcttgtgtcccctggtctcaaatccttgtaagattgcaaaatcatctttttttaaaatagttcccaaaagtgttaacttgatcaacctccaactgaaaattacaaagtctcgccagggtcttaaggcaatttccctccagctgcgtgctggcaaaatgttttaaagagttatgtacttccaaggtgcaatattgccattgggtaaatattgtcaatacaaaaggaataaattggccaaaggccccacacacacctaaagcctagcaggacagatattaaatcttaaagctacaaaataatctatcttgactttatgttcttagtcagggtacaccaggacaaagtgggtcccaaaatcctcaggcatctcatccttatggctgggcacattccatggggctaataacacaggccagagtcaagtgccagaagtagttccaggttgggagtacaagctgcctttggatctaccattctgggatcttgagggttgtggctgcatttctgtagctccactatgaagtgccctagtggggactctgaatggggttccaaccccatctttccccatctttggtactgccttcgtagaggttgtttgtggtggatccagtcctgtagcaagcttcctcctgggcacatagggttctctacacatcttctgaaatctaggtagaaactgcccagcctccttcactcttgcattctgcatatctgccagaatccagttatcccagcaccatttactgaacacagaggtttttttccacattgtttgtttttgtcagccttatgaagtatcagacggtttaggtgtgcagctttatttctgtttcctattttgttccgtttcttctgcatatctgctcttgtaccagtaccaagctgtttttgttaccatgtcattatggtgtagcttaaagttgggtatcatgatgcctctggcgttgttctttttgcttagcattgctttggctattcagggtcttttttggttccatacaaattttagaatagattattttttctaattctgtgatcaatgatgttgatagttttatgtaaatagtactgaatctgtaaattgctttagacagtatgataatttttacaatattccttcttctaatccataagcatgaaatgttttcccatttatttgtgtcatgtatgatttatttatttatttatgctgtgttttgtagttctccttgtagagatctttcaccttgtttgttacctgtatttccaggcatttcatttgtgtgtgtgtgaatattgtaagtgggataagactgtgttcttgatttcactctcagcttggacatagttgggtatagaaatgttagtgattcttgtacattaagtttgtatcctgagactctaccaaagttgtttatctattttagaattattttggcagagtctttagaattttctatgtgtagaattatatcatcagtttggacagatatatctacttcttttcccatttagatgttgtattagtctatttgcacactataaagaaacacctgagactgcataatttataaagatttttaattgtctcatggttctgcaggctgtacaggaagcatggctggggaggcctcaggaacccaacagtcatgacagaaagggaagcatcatgtcttacatggctggagcaggaagagagaggaggtaggtgccaagtacttggaaaccacatctcctgagggctctgtcatgggaacagcacaaaagagggtgaagcatccccatgatctaatcatccctcaccagtccccacctccaacactgggaataacaatttgacatgaaatttgggtggggatgcaaatacaaaccatatcagctccgttttattttttctattgcctggttgctctgactacgatttccagtagtatgctcaataggagtggtgagagagggcatccttgtcttatttcagttctcaaggggtttgagcttttgctcactcagtataatgttgagtgtggttttgtcatagatggctgttattattttgagttttttttttttttttttgagacggagtctcgctctgtcgcctaggctggagtccaatggcacgatctcggctcactgcgacctctgcctttcggggtcaagcgattctcctgcctcagcctcccatgtagctaggattatggttacgggcatgcgccatcacgcccagctaattttttgtatttttagtagagacagggtttcactgcgttagccaggatggtctccatctcctgacctcgtgatccgcccgcctcagcctcccaaagtgctgggattagaggcgtgagcccccgcaccaggctattttgaggtattttttgatgcctagtcttttgagagtttttatgagtgaatgttggatctcatcaaaagctttctcagcatgtattgagaaaatcatatgttttttgcttttattttgcttacatggagaatcacagttactgaattgtggatgttgaatgaaacttgccttccaggggtaaagcctacttgatcatgacgtatcacattttaaagtgcttctggattctatttgttagtattttgttgagaaattttaggtctatgttcaccaagaatattcatctgatgttttcttttttaattatgtatcttcctgattttgtatcccaaggacacacaatgaaggaaggacagtctcccaacaaatgatgtaaaaactggacatccatatgcaaaataaataaaattagaccttctctaacaccatatacaaaaatcaacaaaaataaacataacatgaaaccataaactcatagacaacatggaaaaataattcatgtcattgattcagaaatgatttatttgaagttaatcccaaaagcaagcccagcaaaaaactacatgcaattatatatctgacaagaagttctatcaaaatgtataaataatccatacaactcaatagcaaatatcaaatgacctcataaaaagagcaaaaacctgaatagatttttttcagaagacacatgcatgaaaaacagagcataaaaatgtcctcaagatgactaattgtcagaggaattcgaatcaaaagcacaatgacatatcacctcacaccacttaaaatggctattatcagcaagacaaaagataagaaatgttggcaagaatgatccacagccataaagagagctttgattggccaagagactgatttcagtaactttctcctgtgaagagaccactgaccatggacttgtcctggccaatttccagaggctgtgcactgtgtgtctttctgcccctgcacaaagcccttttgatatgcaggacccaactgtaattcatttagttcttaagtcctcaccccaaagcaaagctgaaatgcatgtatcatgtgtgtttgcttattagacatgagagcctccactccatgtgaatatccatagctccttctatagcctgctgagtgtgtacactcgaccaatccatttgcacaaatttgtttctcatctttccctctcttaaagtgcctgctcacagtctctgtgggaggctttccttcccagcctgttaagatggccatcctgcagcttcaaccctttctgagaaataaagtctcctttctaaatttataaactgggtgattcttccgttgaaagcacaagctgttgggaagagttatatggcaattccataaatgcctggaagacaagtgtggatagggtagggtaagaagtcctgggggctgcacaccccactctgatggaatttccctccagaaacttctgggttctcaagatgagaatccaaacagattccctcatggctctgtcatcaggagaactatactctgataagtatgcccagaacttcctccagacagaccctatagggaaaaaatacttttcaagatctttattctgtgaggggaagggattcttttccatcccagacagcttcatcttagccttcctgagtcatgaaaaggagtataattaataaaacatctggggtcagattcaagaaaataatctgtggatgctgcagccaggagggggagtggaggacggaggaaaatcagctgtaccactgaatactccttgtaaatggtacagcctagagaaagaatagcaagaaatcattggaattcaatttccagaacatatactgctcccctacccaccacatcacctcaccaccaatatgattaatctggattaaagagaaaagtgtggaaaggcacagactccatctaaggactagaatttagggaaaccaaaggcagtgggagagaaaaagtcaaggacagtaaagtgacttaaaacctcttagaccaacagcttcaggaacaaggtcacatcctctccctcactgaaattagatttacctctcatggggcatctgcagggtgcgcaggtgagaactggcaaagagaacatgaaggcactttccaaatctccattagtacctagctcgctttagctgtttggaaaaagcaaaaccacaacaaacataaccaggactaggatcagtgttggaagcacttttcactggcaagacactaagaaggagggcaaattcgaggccagttactatgcaaatatgccactgtgagtgtgtgtggtggtgagctttgagacatagggtctgtgggtaaagttataatcgataaaatcttcaaccacagaatcctaaaaaaaagagccttccccaaagtcccatcagttcctggactcgccatgtgtctggaccgtatcagtggatccggagctccagggaaggggctccctgatggcttttatgattccttgcttgccgtgctgaggtctccctgtagattatgttgggttttctaaggcctattttctattgtaagaggtggtgggggaaacaatttctgtcactgaaagagcattctgagccagggcacagccccttcctactgagcttgagattctgggaggaaaaagttctctgacaggaggaaaaagttcccagacaggaacttccctgcagggcaggagctgagcggcagggggcgctcagggagcacccagcacaggacccagccctggggcaggtgcacaggaggctggggcagggttttctctcaggaattgaatgttccttatttcaaagcaataatgacctaacatttaaataagaatttagcaagtactgatgtgcctgtaagtattttattgtatacgcagcctatacctaacccaataatttaatgcaaaccggatttaaaaggagaaatgtctaggtctttcaaatgtatttctagttaggaattgaggggtggttttattaattcaatgggtgttactgtccggagacacactcatcccagaagttagatgtgcagagggcaaggctcaggaaaagttcaggtagacagtgagccatatgaacagggaatcacattgaggaccatgtcctgtgagattctgggtttctgtgagaggagttctgtcttcatggacttctgggcatgtcagaggacaaatattaaacaaagttcagggcagggagctcagcatcccactgtggcgtggtccacatgtcacctatcttcttcctcagggtggcgtggcctgagctatgaaaaacctgcctcatgaatatgcaaatgcactgctgtctaccgaggtaaatacagatctttccttgcccagagaccatcacacaacagccacatccctcccctacagaagcccccagagcgcagcacctcaccatggactgcacctggaggatcctcttcttggtggcagcagctacaggcaagagaatcctgagttccagggctgatgaggggactgggtccagttaagtggtgtctcatccactcctctgtcctctccacaggcacccacgcccaggtccagctggtacagtctggggctgaggtgaagaagcctggggcctcagtgaaggtctcctgcaaggtttccggatacaccctcactgaattatccatgcactgggtgcgacaggctcctggaaaagggcttgagtggatgggaggttttgatcctgaagatggtgaaacaatctacgcacagaagttccagggcagagtcaccatgaccgaggacacatctacagacacagcctacatggagctgagcagcctgagatctgaggacacggccgtgtattactgtgcaacagacacagtgtgaaaacccacatcctgagagcgtcagaaaccctgaggaatgaggcagctgtgctgaggctgaggagatgacaggatttatgaagtttaaatctgtttagaaaatgggttgagtaattgagtaaaacagcaatggaaagatgtgtacactgtcattatgtaggaaatagtattttcaactgtcaccctataagtaacactcacagagtgggaaaggcagccatcaatcaagctgatgcaaacattcccatgggggctttgtggggacatacattttataattggatctataaatcattagaaacaggattgcttgatctcatggtaagactaaatataatttccaagaagtggccgaaatttcttccaaaatgtctttgcccttccttttacattgaatttattttaaaggagttttaggatcacaacaagtttgagtagaagaaacagagttcccatgcactcctgccccccgacgctcagccttctctgctatcaacaccctgcaccagtgtcataaatcggttacagaggatgaatctccacagacacattggttgtttccttttctggtggtccctggtataacaagcctcaactatcttgaagcaccccaggttcaagtggattcttcaagtgggttactgggaatgatgccaggtagaaggaaagtgggtgggaccattcctctttgcactctttcctcaaggatccataaaatgtacatttacatggagctcctctttctcctggttttatatgcctcttccccaatggtaaggtttcccagtgtttacagcgggggtccccagtccccgtgctgtggatccgttaaggtgtgcagtgcgttaggaactgggccacacagctggagatgagtgggggcgagccagcatcgctgcctgagctctgtctcctgtcggatcagctgtgcattagattctcctacgagccgaattcactttttttatatatatactttaattctagggtacatgtgcataacgtacaggtttgttacataggtatacatgtgctatgttggtttgctgcattcatcgaattctattgtgacctgcacatacaaggggcctagactgagcgctccctatgagaatctaatgcctgacgattgcagggggaacaagttcatcccaaaaccacccaccgccatcatccatggaaaaattctcttctaccaaactgttccctggtgccaaaatggttggggacactggtgtagaggcaggtctgtaccttggaaagccagcagcttctggtgaatcccataattaatgtcctttaatgagaagtggagactttggtcatgagggccttcgtgaataatgccctacagttggattcaaaacattgtaagctcttggggggtgtttctggataaagccctttgtgcagaaaatgcagacacatccatgggatccatgcaggaaaaaagcttcctttacaaagtggtttggcacctggaaggagctctcagggttgggcactgtaccctttgctggctgcactttagccagaggcttaagcctgattggtcttgcagtgggagagccttcctggggtcaaaggttacaaaaatgcctgtcatcttccagctgagcaagcccatctgcgtgcttgtcagtgtcaaccccatgaagggtgcactctggaagatgacaagatgcacacaaacctcctcccactgattatccactaccacacactcagctgcaacccgtgctccagaaacggacaggggcctgcaaggataaacagaatggaagtattttattacctgggaaagcactgccaaatgccacgtttcaggaaggttaactcataagtgttcaggaagtgactgaagggcagtggtgggtgaggtgacgggactgcctcagggctgcacatgaggagggctccctcccacacagccttttcctccaggagctgcaccaggaactcacagaggatcaggaaggattctgagaacattcttctgtggcgctgactagaggggcaaaataaattataaaaaataaatcaattctaaatataatatgatgtttgttattagaaactatttctggatcctgtgggaaccctgacataagccaccattctctgtgaacaaacatttaacctctccttccatggggaggtcgacgagcttggattggttctttcatggatagtatcccccaaactcctctccactccctgcgtatccccgggtctctcagtgacaagttctcctcagtggaatttggttgatgtagtgagatcttcaaatttcctgtcgtctgtgttctcatgttctccccttatctgagattaagaaacgcacctgcatgtagtaaattatagcctactgtctctcatggacaaaataatggccacgccaaccaaccttgtggctgacagcaaccactggcggccaccatcccctccacagcctgtgttggaacatcacctgagagattgtgttagcaactttccttcagaatcatcttaaaaactttgtgtcccatttcacatggagacgtcatttttccatttcatcttcatagagaaatagaaggagaagaataccaaatacacttcctatctccagattattcaaatataattgtccctttatcaccttctgatttctggtcttcacagaatactctacaaatttttctcactggcgttataccaaaagttgtgaagcaccagatactgggattaatttaaccaacattattattctaataattcttagaatttagaattacaattatcatcttttcgtatacggataaactaacctatgcctttgaaaataagcccttacatgagagtgaaaagctatagatttggaggatttccttgcaaatccaatatttggaaaacggattttatcacaaatatacaaattaacttacaattgaacaacaaaaccacagaatttaattttaaaatgggcagagacctgaatagaaaccatatccaaaaaacaaacataaaaagtgatcaacttgattttcattaggtgtacttatgtttaatatttaaaaagttctactaaactatgagaatgggtaaaaattacaaggtagacaatatcagatggtgatgaggaagttgaaaaacaggaactttcaccccttgctggtgggaatgccgaaatggcacatagaaaactacagttaataatttattgtatatttcagaatagctacaagataagatttggaatgttcataacactaagaaataatcagtgatatagatgaaggatatcctagttatccagatttgatcactgcacataaaatgcttttatcaaaatatcagttgtaccacctaaatattttgaaatattgtgtatctatataaatcaaacattaaaaaacaccaatgcagtggaatccagctaattgcagattcccattagatgggatgtgctgcatgatctgtaaactaatcagaatctgtgggtttgtaaaggactttagaaatcaactaggctgcttgtttctaaagataagtctccctagtttaaatattttcttaatgggtggcgattttgaacatagaagaaatagtaatatttgtgtcttgtaagttttcttcttctcgtgtcacgagaaaaggtttgcagggaggaatctgggaccatctttcaagtctcaacttcactgtgattacctcagtaagtattttctgatacccctgactaagataagtctcgtatctgtcctagaaactaaaagtagaattctaagcatctacctgaccagatggacccttcctcttcaccaaggagttccagagacacttttaaacctagctccggccgtgttagaaatagaggatcagaaatgcctcattataccctcctccctttggaattcaagcacaactaaccagcatttttatgaaaacagagcttaaggctcagaaaacagattatttgtagcagtaagataccaaattctaaccttattcgagaatatcatcacaggacagagagcaggcattgaaaggaatcaaaggcttttaccctaaaatatattcctttgacatattttaaaatagccaggcacagttatcttttgtgagagagatttacattctgtagagaatctccttccctttccaggtctttttcttataccgaggagattagctgagggtctagcttcttttaaaggtcttaggagaaaacatttcccagctattgcctctaaaggtggtcacataagagacttcatctacatagtaagaatcttgttctccaaaacctgttatcttaacctagaaacatttttctaccggtttcaggtctttagaaaaaagcttaaatctttcaatcaattgtcaatcagaaaatattcgaactcactgtaagttgtaatccccgccacacactgcctcacttctagctgttttgtctttatggaccaaatcaacatatatctcacatgtattgtttggtgactgtctctctagtacactaaatttaagctgccatcaagccactttgggcacatgttctcaagatcttctggggctgttcacagttcatggtcctcacattcgcctcagaataaatctctctaaatattttgcaaggttgctttttcatcagtagttctaacagaacctactctgtggtttttgttaaaagcattatattaatatagtattagtaatattagtattagttataacacatgttggaaaattcttatgaagttatgcatagactaacaatgggatcaagtgtaaatgtttcaaagtatttaagcaagttatttcaaaatttatcttctgcagatacttctatcagattcattatatcagctaattacttgctttatgatttttgcattttattgtagatgatcacaccctatattttcttggcctttattgtagaaaattgtgtgaaactagtcagggctacatttgcaagtaattgtcgcagtggctgcctgaattgcagtgggtttcctctgcagccaccagtcactcagattactccaatgacaccttaattttgtttcctgcttggctttgggccttagtcttgtgctctccagacagactctgtctttcatctcccctaggtcaggccagagccacatggacctgatgattgtcaatatggtgggaagggtcgcactgaacgggcactctctgtccttctgagggagccatactgcaggcagacatggcagtcctggctcagggtgtgtccttccaagtatccctgcccttccttcaggtgtgatgctgatccatgcatcttcctcccattcctgggtagagggtctccttgttctttccccaatcttctcccagcagccactatgtcttcccactgatgtcttcagcttcctcttttctgcccttcccagcagatgagtctgttattcctgagggaagagagaggaggtgggagatgaggctgttattcctgaaagaatggacagagctttggagcttttctttcttctaccccagtttctacgagttcctccagtgcctgtaacacagagctgtcagtggctttgcccctgcatgttaattctttggtcatgtagtggtggtgagggagctgggtctggatgcatttcagccacagctgctgttccacttccccacacagaaccgtctcaggaggaagaggttggagatttttctgatgtgtcctcaatcctgggagaaaagttttcaatagcaataggaatctctcagttgtatgtccgctgagaatttaaacaataacttctttataatactaaattttaaacaatccaatgaatatatctaatttaattttgtattagcttatgtgacatttgctggcctctcccccagataaggtcatattctcttcctgtttgttcctgcaagtcactgaatttcacaagatgtaaggtctcttgattatactataacatcaataatctggtgtactaaagaaaatgtgctaatttgcagcttactaaaattagttgttttagtaaaaataatatatttgttatagcatgcctacatctccaggctgagtagaagctttgtttgtaatactcagaaactgcaaataacacacatattaaggagctttctaaataaatactatgggtgaattctttaactggaatactgttcctcattagaatcaacacattctttatacacaaccaaattactgactcacaagtaattatactgagcaagaagccacacaaatgaaattgaaaatataagatttcactttaacaaaatcttgaaaaatagatctgaattaacaaagatgagaggttgactcagtatggtgagagggaaataatggggaggcaggaatgagaggaacacagggaggcttttaactgtaatcatcgttatctcgattgttattttggatacacaggtgagcacacgtgaaattacgttttttttccttcggagacatggttttgctttgtcgtccaggctggagctccgtggtgagatcatagctctctgcagcctcagaccctgggtctccagcaatcctcctccctctgccctatgtagctgggactacaggtgtgcaccaccatgctcggcttcagtgcgtattaaaccgcacacttcaattatgcagtatttattatatagcaataatgcctcaataagggtattacaaataagtggatagataatttgttaaagattgatggaaagatagataccaacatgagaaatgtatgacactcaagaaaataaaactgtaggaaacttgcttttctttatatttgttaggtaatcaccacagtgtgtacacatcacaccatgttcccattacagagaaaaggttctgcgaacctcacgagctgtgacccctgtgtgctgggcttggttcagggagaagtcaggtccagtggtgagaagcacaggcccagatgcccaggctcactctgaccaaatgtgagcactggggacattgtaaaacccacctgtgcttttgctgataatttttcatctttaacatggaaataatattgatactatataccatggtttctctgcgtatgtaaaaataaaagatgattggtgctaactttaaaaatatgcagtttatgtagatctatggtacctcaataaaactgttttaaaataaaaattacaaaattataagattttcaggttttaaggtttaagtttatcacaaaacaaactgacaataggaaagcacaatttcccaatgctttcaatatcacagatctccccgaggacattctgacatgctctgagccccactatctccaaaggcctctcaccccagagcttactatatagtaggagatatgcaaatagagccctccgtctgctgatgaaaaccagcccagccctgaccctgcagctctgagagaggagcccagccctgggattttcaggtgttttcatttggtgatcaggactgaacagagagaactcaccatggagtttgggctgagctggctttttcttgtggctattttaaaaggtaattcatggagaaatagaaaaattgagtgtgaatggataagagtgagagaaacagtggatacgtgtggcagtttctgaccagggtttctttttgtttgcaggtgtccagtgtgaggtgcagctgttggagtctgggggaggcttggtacagcctggggggtccctgagactctcctgtgcagcctctggattcacctttagcagctatgccatgagctgggtccgccaggctccagggaaggggctggagtgggtctcagctattagtggtagtggtggtagcacatactacgcagactccgtgaagggccggttcaccatctccagagacaattccaagaacacgctgtatctgcaaatgaacagcctgagagccgaggacacggccgtatattactgtgcgaaagacacagtgaggggaagtcattgtgagcccagacacaaacctccctgcaggaacgatgggggggaaatcagcggcagggggcgctcaggacccgctgatcagagtcatccgcagaggcaggtgcagatggaggctgtttcctgtcagggtgtgggacttcatcttcttctgacagtttctctagtgaacctctctaacctcagaattctgtgcttactaatgtcatctctacgtattttttaaaagatcattttaatatgagcacctattctcacacgcaccaaatgcagattgacgcttacagagatgaaaagttctcaaccatggtcaccaggatgagagtcctgaggaaattcaggggtgcctggtgactcttccgcaatcagtcctgggacagaaacctcagggacagcctttatgagttttgatcacatctaacagagaggatgggccagggccagagtcatgtagaacctcacaggttccacgtctgacccttctcctgacactaaagccaatcagcatcagcactgacctggtgctccttttgctcccaatccatgttctttctttggagagtttcttctcccttttttatttgcttttcctctttcctgaaaaagaaacagatggtccccttggtccacattccagggctcaaggcattttcttggagctcaggtggggctcaggctgtggctcctgcagccacgtgggagaggctgatgggacttccttctctccccattttctcaggaccctctactgtgttgtgtgtaggctcatctgggaatgcagttgaccattaatactgaaggggacaaactcatttgatcaaaatgggatgtggatgtggagttaaccctgttccgtgcacagtgtcagagtcgtctgcttcagaagtagtgttagaaagagctggtgaaatttatcagaatcaagatggagccacttgtgttaaagccctaatgaatgaagctggggaaggccatgaaggagggttctaacacacatattcctgataataagaactaccataaatagactctgcacaaccataaccttgcacagaagccaccacaacattaaaagaattacttctcccattgtatctgcccagcaactccctgttcaactttacaccgatgtgcccctgttattgatccttctagcccaggacaattgtcttaaacagctgatgtgaccctcctcatttttcctttattctttatcttcctataccaacctgaatgcacccatacatttcaattgcaatacacttcctagaatacatattattatattttagagtctctctctctctgttattcagggttgacaagctacagatggacatgccactttctttttttatgactttttttaaaaattttattattcttgtactttaagttttagggtacctgtgaacaatgcaggtttgttacatatgtatacatgtgccatgttgttgtgctccacccattaactcgtcatttagcattaggtatacctcctaatgctctccctccccactacccccaccccacaacagtccctggagtgtgatgttcctcttcctgtgtccatgtgttctcattgttcaattcccacctatgagtgaggaaaaaaatgatgagttcatgtcctttgtagggacacggaagaaactggaaaccatccttctatcattctcagcaaactatcgcaaggacaaaagacatgccacttttctgtgagatgtggaggatgacagtttttggagatgtctgggaatacccagtgtccagaagatcatccatcaataagtgcaggctggaggtcccagagagaggcaaagctgctgaaacaccatggaatttcattttctccagttctgctctgatggaatcaggcccacctgttttgcttgtcttaagtaaattcacagcaccacatatattagtgttgcagtgaataactacaaagtctatcctaaccaagtgtaccatcaaatttaccattacccagagggaagaatctttaacatgagatctatgttcataattttttaaggtgaaaaagtgatcactatccaatcaggcaaatatgattttgctaatgagtggtagatgttgcatgtatttttggatgtcatccctttttcagatgcatggcttgcaattatattttcccattctgtaggttggaattatttccacactttgtagaatctttttgttgtgatgtagttccacctgtttaattctgcttttgttgtctgtgcctttaatgtgaaatataggaaatcattgttaatatattattttctgggtcggggaaattttacaattgcaggccatatgtttaaatatctggcccattcagagtgatttttgtgtttattctaacccaaaattcttaactctttgcatgtgtacatccagtttttctaacacattcatagggagagacttggtttatctgttttatattgtgggttcttatgctgaaaatcagtttgccattgatacatcagtttatttctgagctctttctacatatttatgccaactccatcctgtttttattattctacttttgttattacttttgaaatctggaagtaagatgtaagtttatttttgcctttttacagatgctatagcaaaatattttaacctttcactcttccatataaaagtatggctttaaataatgacttttattatatacaggttatattcttgtattcctaacttttagaggttttattatgagatcttgaattttttaaatgttattttctatgtctggtgagaagttaactgatgcttttcctttattctcttaatttaccacatcagatttattgatttgaagatattgattcatcagcgcatctcaaaaataatttggagcttgtcatggtgtacaatccttttaaagtcttatagaacttagttgactatgaattgggagtagcttgtttatatatactaagaacatttgtcagaagctctttcttgtttattcccagtttgcacttacatatactataaaacataatatataaattttttattcctttcatagttatataatatagcaattacaaagataaaaactgcacttcatcttgattttcccattttgtacagtcttaatttcttcgtatagatttatgttttgaatgtatatcacacggctactagcagagaaagtttgttaaaatgtgcactgaagcatgaatgtgctgacaataaattgtctcaagatctttttgtaatgacagaattttatttgcctttcacttttaatgaaaatgtaatgcacatagaattccagtttgcatttcacttgtaatttattttcttgtgtttattattttgttcatggagatgatcacacattacattctgctgggcctttattaaccacatttctatgaacctagtcagggttggatttcaagtgtatggttgccacggctatcagagttgaagtcagcttctcctgttcacaaaaagttcaggttcctccagtgatacccacttttgtgtcccggtttggctcttcccatttctttctccccagagagagcctgtctctttcatctgtggcaggtgcatcctgctgacacttttacttggtgattgtttgtggggtgaaagggcttggacacagggggatgttctccaaccttctgaccaagcatccttcttagctatgggtggtgagaatggctctgaagcatggtcttccaagcgttcctgttccttcccttccccaagtcagagtgtctctttctagccacagtggtcttccatcagtgtcctcagcttctgacccactgtccttactccacagactcaggatttcattcctcaggaaagagacgggaggtgtttctgggtagagtctccttagtgtcctctgtttccttctgttctagttgattctaccagtgcctgaaggacacaagatttaataaatgtctcccacatatcgtgaagagggattcagcattgaacggagctactgttcttcctccccagtcaacatcacaggacagcaggtggctgagttgtctggggatttctccaattctgtaggaaaagcccgcaagtgccaggagtttcacactctcacagcattagcacacacatcctcaacaactcatgaaacatttccaggttagctttttcctatcttcaataccatacaatgagtggcacctgccccaggtactctaataaatggacctagttttctctgcaggctccccattttctcagatttcaggggtttttttctctgcaacatcaactcagatatgttgaagggttcattttttgtagttcttcaagtttcttgttaatgaggtcagaagaagatcattttctcatttttttttttacattcccgtgcttagtatctgctttctaaataaaattcggaaactaagacaaaatatcaaatatccactatttggtgcattgttaaactatttgagaaatattcatgtactgaaatacaatgaacaattgaaatcaaggcatgcctcagtcacataagaatgtgaggacattatcaaataattgtgctgagtgaaggaagctaaagaattcacagtaaatctcctgtgatttcttttgtataaattgtagaaaatgcaactattctaaattaacatggagaagatctgaatttttctgagaaaagtgtggtgaggtaacaagatggtgaaataaaattacagagaagtgagagaaaaaaatttggaggttaatttaattgctaatagcacgattgaagtgctgattcaaaggctgcacacatataccaacattttccatatcgtacactataaatttgaattcactattgattgaatttttgaataaagcagtaacaaaaatgagtatattggctgaggaagagcaagaaagagatgaatattgacacttgaataatcacggactcctgaaaatacacacatgtgaacactgattgcatatttcaggtaaatactagaaaaagcaaagtcacataaagtcgttatgacaggtgggataccctgcaaatcacactaggcatgtcccacactgccctggagctgtctcaggggagcagtctcctccagtgtttagaggcacaggcacggataatagggctgacgctgtccagatgtgtgatattggacacattgcacaactgctctgttatgtatgtaattcatcttctctaaaaatgtaacattgacacttgcactgaatatattctgcaaatatgtaaacattaaataagatgatgactgctaattgatcatcaagtcacaatcacataatctgaagttatattttcctgagagataggattacctccagtgttttccgggaccctctcatctgctctgggcactgccctctcctccagcgtcccactagagcttgctatatagtaggagacatgcaaatagggccctccctctgctgataaaaaccagccgagcccagaccctgcagctctgggagaagagccccagccccagaattcccaggagtttccattcggtgatcagcactgaacacagaggactcaccatggagtttgggctgagctgggttttccttgttgctattataaaaggtgatttatggagaactagagacattgagtggacgtgagtgagataagcagtgaatatatgtggcagtttctgactaggttgtctctgtgtttgcaggtgtccagtgtcaggtgcagctggtggagtctgggggaggcttggtcaagcctggagggtccctgagactctcctgtgcagcctctggattcaccttcagtgactactacatgagctggatccgccaggctccagggaaggggctggagtgggtttcatacattagtagtagtggtagtaccatatactacgcagactctgtgaagggccgattcaccatctccagggacaacgccaagaactcactgtatctgcaaatgaacagcctgagagccgaggacacggccgtgtattactgtgcgagagacacagtgaggggaagtcagtgtgagcccagacacaaacctccctgcaggggtcccttgggaccaccagggggcgcccgggacactgagcacggggctgtctccagggcaggtgcaggtgctgctgagggctggcttcctgtcgcggtctggggcggcctcgtcgtcaaatttccccaggaacttctccagatttacaattctgtactaacatttgatgtctctaagtggaaaacgtttttgtcctttttgtttctttgtttttgtaacaagaggaaacatcctcagctccacagaagccagggtgtcactttggggacagaaataatcctttcatggtcaccaggataagagtcctgaggaatcccagggaaacctggagagtgttttccagttagactcagggcagagacctccatgggaatctctgattagaacaggccttgagctctgacgggagccaagagagaggctcgcccagggtcagagtccttaaaacctgatggttttcacagctatcccccctcgtcttgtaaactcagactgattcagttgaccctctttctgctaatccatttccttctctgtaggtttgattctcacagttcgctttcttcttctcttccctgaaaacagacgatgtgttttctgtagtcaaaatcccagggctcaggtctgcaggacctgggtaggctacggggactttctcactcaccattgtctggacactcttgtcttctgtgcatggaggcatttggaaaatgaagtggacattagccatgaagggaataatactagttttctccaataggatattgatgtagagctgatcttgtgcttctcacactgtctcagagtttggactttcacctgtgactttgagaagagctggggatgggcactccattgtgctgtgagctctgggtaacgataattgtagaatctgcctaggcagtctaaggtcaatactactggtcatcaggaaagacagctggaattcctgggaagatctgcatctgccgtccaccatggagtcccatcgtcttctgttatgctctctttgaatcagtcccacctagattatctagaacactcttcctgacttaggaaaaataatggcaggctccactaacacctgtgttatgccatgggagcaacacctaagctagtgtgtgaatgagtagatgagactgtggtctagtcaaggtgacaggtaaaattgattgttgccattatgatattttattttatatttggcaatatagtcatgctcctattataaatattttttgagacggagtcttgctctgttgccagcctggagagtgcagcagcacgatctcggctcactgcaacctcttccacctcccaggttcaagcagttctcctgcctcagcctcccgagaaactgggattacaggtgcacgccaccatgcctggctaatttttgtatttttagtatcgacagggtttcaccatgtgggccagtgtggtctcgatttcctgacctcgtgatctgcacacctcggcctcccaaagtgctgggattacaggcatgagccaccacacctggcctagttttattaatgtctgtccataccagcaactacatacctatggggacattaatttacatctgcagacagatgtgtaaatacacaagcctatacatacatgtgtagccatttatatttaacattataataaaataattctaaaatattttctaaagaattaaacttaatgatgagctaaatataaattagagtaatctataattgatttcgatcattctctatagtttgcataaatggatgtctatttctaagccttaacatagtgtattcgtcattttaaaacagtcaagaaaaaattacaaatgttcttgtcacaaaaaaagataaggatttgatgatttgaggtaatatatatgtcaattaacttgattcaattattctgtattgcattcacaaaccataacatacctttgtgccccataaatatatacaaccaaaatttctcaattttcaatgaaattttaattatatatttttaaatctgatgcctctccttggattaagccacctcctcaggcttacagggctcttccattttctcaacatgctgttataccagatgagcacaaacacattaatttcattatgcttagctttaatttttcaaaacaacatgaaggtgataattttaccaatagacgtattgcaacctactatgcatgagaccctttctgtgcttcaaggtttcttctcaggactttatatgtattgcaaattttcatttttttctgatatggaatgctgatttctctttattacagattatcagtttatttttcaaatttatctcttaaaattaattttttcaaagtcccactcaaaccagggtattattagaactttgaagtgtaatagttggaccaactttgagaatacattcaatttagttcacgtgctctcaagtatcttttcttctttaaaagttgttgtcagttgtaatatcacacaaaatattagtaatttatactaatgacacaggttaaaatattgtataaataatttaattacatttgattggaaaaaaggaatatatgttcctcatatcttgacttttttttcttctctatgagatgcatgtttattaattattaagtttaagatgttacccttgtctttttgatttctgggatttaattttagtacatatacttgaatgcattgtattaattcatataataatgttcatattttggatagggttttaatattaattttgttattactgaattttaaactattctacactttttcattttttgtttttatgcgataaaatttacatataagaaaatatgcatagatctggaatgtatcactagagagtttctggcaaatgtgaatacccttgtccccagcacctaaggtagctgaagagcaagtccatccccacatcgcgggtctttccctgtgcctgcggtcaactcctgcatggggaaatgttttgatttctcacactacagatccatttttttccgttttgaactttatataaatggaatcaaacattatagaccttttttttgaaaggggcttcgatatttttgagattaattcatgctatttaatgtataaaattagatcaacatattgtcatttattcaattcatggactgactctgatatgaaacctcaaagttttcatgtatatatggagacagggagaggaaggagaaagattttatatctgagtcagtccattaagtaaataaatgagaatattttgatttattttcctgttgatgtactttaaatttgtttccattttatgaatattataggcaaagccgttacaaatatattagtgtaggttttcctatattgtctcatttttgttgagaaaatatgaagtatatatttctttttttatttttgattactatttatttatattttatattttactttaagttctgggatacatgtgctgaacatgcaggcttcttacgtaagtatgcatgtgccgtggcggtttgctgcacctatcaacctgtcatctaggtttgaagcacctcatgcattaggtatttgtcctaatgctctccctcccctttcctaatgcttttcctcccctgacacatcccagtgtgtgatgttcccctccttgtgtccatgtgttctcattgttcaactcccacttatgagtgagaacatgtggtgtttggttttctgttcctgtgttagtttgccgaggatgatgatttccagcttcatccatgtccctgcaaaggacatggaaatcattcttttttatggctgcatagtagttcatggtgtacatatgccacattttttcatacagtctatcattgatggacatttgagttggttccatgtctttgctattgtaaatagtgctgcaataaacatacatgtgcatatgtctttatagtagaatgatttataatcctttgggtatatagccggtaacaggactgctgggtcaaatggtgtttctcgttctagatccttgaggaatttccacactgtcttccacaatggttgaactgatttacactccccctcaacagtgtaaaagtgttcctatttctccacattctcaccagcatctgttgtttccagactttttaatgatcaacactctaactggcatgagatggtgtctcattgtgattttcatttgcatttctctaatgaccagtgataatgagctttttttcatatgtttgttagctgcataaatgtctttttttgagaagtgtctgttcatgtccttcgctcactttttgatggggttgttttttttttgtaaatttgtttaagttccttgtagattctggatattagacctttgtcagatggatagattgcaaaaattttctcccattctgtaggttgcctgttcattctgatgatagtttcttttgctgagcagaagctctttggtttaattagatcccatttgtcagttttggcttttgtcgtaattgctttggtgttttagtcatgaagcctttgcccatgcctatgtcctgaatgatactgcctatgttttcttctagggtttttgtggttttagattttacatttaagtctttaatgcatctagagttaatttttgtataaggtataaggaagggatccagtttcagttttctccatatggctacccagttttcccagcaccatttattaaatagggatcatttccccatcgcttgtttttgtcaggtttgttgaagatcagatggttgtagatgtgtggtgttatttctgaggcctctgctctgttccattggtctatataactgttttggcaccactaccatgctgtttttgttactgtagccttatagtataatttgaagtcaggtagcatgatgccttcagctttgttctttttgcttaggactatcttggctatacaggctgtttttagttccatatgaagtttaaggtagttttttctggctctgtgaagaaagtcaatggtagcttgatgggaatagcattgattgtataaattactttgggcactatggtcattttcacaatattgattcttcctatccatgagcatggtatttatttattataaaagtaactttaattttttcagttttaatgaggaacaattgaaatatttttaaatgtatatgtttaaggtgcaccacttcatgttttgatattgtgttagtccattctcacactgctataaagaaatgcctgagactgagtaatgtgaaacaaaaaaatagatgtttaattggctcatttttctgcagactgtacaggaagtgtagtggcttctccttctggtgagactcaggaaagttagaatcatagcagaagacaaatagtagtagacacatcacatggccagagcaggggccacaggaagagagggaggtctacacagttagacaaccagatcttatgataactcacacaatattatgagaacagcgccaagagtcagtgctaaaccattcatgaaagacccaccccatgacccaagcatctcccactgggtcccagcttcaggattgaggattataatacaacacgagattcaggccaggacgagttgcaaactgtatcagatacacattgtaaaatgctcatcatgatcaaggtaatttgtgtgcctatcatcccacatacattttttttttaaatggagtgtgtgtgtgtgtgtgtgtgtgtgtgtgtgtgtgatgagaatatctaagatctaccctttcagcaaaaatcacttttacaacacagtattaaatacaggaacattgctgtagattagatctccagaactcattcaacctgcacacctgaaattctgtaccctttaaacatcacccaatttccctctcctcccacatcctgggacccattattttactttctgctttcaagagcttgggtgttttagataccacatgtaaatgagataatgcagcatttgtctttctgcatctggcttattccacttagcatcatgtcctccaggcccatccgtgttgttgcaaatgtcagaatttccttcttttcaaagcctaataaaattcagttttatgtgtacacattttctttatacattcatcagtctgtggtcattaaattattttacaaatctacactattataaataaccttgcaatcagcatgtgtttaacataataattttacttatttgaatacataacaagaagtgggatcaccagatgatatgatagctttatttttcaatttattgagtaaccaatcctaccacaccctaaaaggattctcttttcaccacattcttgccaatatgtgttatatgtcttgctgatgatagccattttaagcagagtgaggtgataactcatcatgattttgatttgaattcctctgataattagtaatgttgagaaccctttgaggctctgtttttcatgtgtgtgttttctgaagaaaaacctatccagtttttgccctttttatcagatcatttgttatttgctattgagttgcatgagttatttatacttttggatagaacttatgtcaggtatataattgcacatagtttttttcctgtgcttttttctattaaattcaaagaaatcatttctgaatcaatgacaggaagtttttttccatgtgttctatgagtttgtggcttcaggttatgttcatttttagtttatttttgaatacggtgttagagaaggtctaattttatttcttttgcatatggatgttaagcttttacatcatatattgaggagactgtccatccttcactgtgtgttcttgggatacaaaatcaggaagatgcataatttaaaaagaaaacatcagatgaatattcctggtgaatatagaccgaaaagttctcaacaaaatactagcaaatagaatccagaagcactttaaaatgtaatacctcatgatcaagtaggctttacccctggaaggcaaggttcattcaacatccacaattcagtaactgtgattcaccatgtaagcagaataaaagcaaaaaccatatgattatctcaatagatgctgagaaagcttttgataggatccaacatccgctcataataaaagccctcaacagactaggcatcaaaaaaacttacctcgaaataataagagccatctatgaccaatccacagtcaacattatactgagtgagcaaaagctcaaaaccctttagaagtgaaagaagaccaagatgccctctcaccactgctattgaacatagtactagaaaccctagtcagagcaaccaagcaatatcaaaataaaaggcagctgatatggtttgtacttgtgtccccactcaaattaaatgtcaaattgtaatacgcagtgttgagggtggggcctgatgaaaggtggttagatcatggggatgagtctctctctcgtgctgatcccatgatagagccctcaggagatctggtttcaaagtacgtggcacctccctcgtctttcttcctcctgctccagccaggtaggacatgatgcttccctttctgtactgattgtcaggatcctgaggcctccccagccatgcttcctgtatagcctgaagaaccatgaaacaattaaaaatctttataaattacacagtctcaggtgtttctttatagtttgcgaatggactaatacagaatccaaataggaaaagaagaactcaatgtatctctccaaactgatgatataattctatacctagaaaattctaaagaccctgccaaaataattctagaatagataaacaattttggtaaagtgttgggatacaaaatcaatgtacaaaaatcactagcatttctataccccaactatgtccaagctgagactgaaatcaagaacacaatcctatcccacttacaatattcacacacacaaaatatgaaatgcctggaaatacaggtaacaaacaaggtgaaggatctctgcaaggagaactacaaaatacagcagaaataaataaataaatcgtacatgacacatgactcatctgacaaagggctaatatccagaatctacaatgaacttaaacaaatttacaagaaaaacaaacaaccccatcaaaaagcgggcaaaggatatgaatagacacttctcaaaagaagacatttatggagccaacagacacatgaaaaaatgctcatcatcactggccatcagaggaatgcaaatcaaaaccacaatgagataccatctcacaccagctagaatggcgatcattaaaaagtcagggaacaacaggcgctggaggggatgtggagaaataggaacacttttacactgctggtgggactgtaaactagttcaaccattgtggaagacagtgtggcgatcctcaaggatctagaactagaaataccatttgacccagcagtcccattacttgctatatacccaaaggattataaatcatgctgctataaagacacatgcacacttatgtttattgtgtcactattgacaatagcaaagacttggagccagcccaaatgtccaccagtgatagactggattaagaaaatgtggcacatatacaccatggaatactatgcagccataaaaaaggatgagttcatgtcctttgtagggacatggatgaaaatggaaaccatcattctgtgcaaactatcacaaggacagaaaaccaaacactgcatgttctcattcataggtgggaactgaacagtgagaacatttggactcaaggtggggaacatcacacaccggggcccgtcatggggtcgtgggagtggggagggatagcattaggagatatacctaatgtaatgttaatgggtgcagcacaccaacatagcacatgtatacatatgtagcaaacctgcacattgtgcacatggaccctagaacttaaagtattatttaaaaagaaagaaaaaaactattaatttttctgaaccatgaacatggaatatttcagatatattttcaatttgtgtgtgttcactttattttttattatcaatcatttctggttttcttttagaaatctttcacttatttggtaatatgaaatataatttttagctattataaacaaaatgctttattgattttttgctgtttgcatttagcaatgccaccaatttttgtatgtaggtgttgtattctgcaaatttacagaattttttatcaattataacagtttttccagcaccatttattaaatagggaatcgtttccccatttcttgtttttgtcaggtttgtcaaagatcagatggtcgtagatatgcagcattatttctgagggctctgttctgttccattggtctatatctctgttttggtaccagtaccatgctgttttggttactgtagccttgtagcatagcttgaagtcaggtagcgtgatgcctccatctttgttgttttggcttaggattgagttggcaatgcaggctcttttttgttccatatgaactttaaagtagttttttccaattctgtgaagaaagtcattgatggggatggcatcgaatctataaattaccttgggcagtatggccattttcacgatattgattcttgctacccatgagcatggaatgttcttccatttctttgtgtcctcttttatttcattgagcagtggtttgtagttctccttgaagaggtccttcacatcccttgtaagttggattcctaggtgttttattctctttgaagcaattgtgaatgggagttcactcatgatttggctctctgtttgtctgttattggtgtataagaatgctagtgatttttgcacactgattttgtaccctgagacttcactgatgttgcctattagcttagggagatttggggctgagacaatggggttttctagatatacaatcatgtcatctgcaaacagggacaatttgacttcctcttttcctaatcgaataccctttatttccttctcctgcctgattgccctggccagaatatgtagaaagctgaaactggatcccttccttgcaccttatacaaaaattaattcaagatggattaaagacttaaatgttagatctaaaaccataaaaaccctagaagaaaacctaagcaataccattcaggacataggcatgggcaaggacttcatgtctaaaacagcaaaagcaatggcaacaaaagccaaaattgacaaatgggatctaattaagctaaagagcttctgcacagcaaaagaaactatcatcagagtgaacaggcaaccaacagaatgggagaaaacttttgcgatctactcatctgacaaagggctaatatccagaatctacaatgaactcaaacaaatttacaagaaaaaaacaaacaaccccatcaaaaagtgggtgaaggatatgaacagacacttctcaaaagaagacatttatgcagccaacagacacatgaaaaaatgctcatcatcactggccatcagagaaatgcaaatcaaaaccacaatgagataccatctcacaccagttgggatggcgatcattaaaaagtcagggaacaacaggcgctggagaggatatggagaaataggaacacttttacactgttggtgggactgtaaactagttcaaccattgtggaagacagtgtggcgatcctcaaggatctagaactagaaataccatttgacccagcagtcccattacttgctatatacccaaaggattataaatcatgctgctataaagacacatgcacacttatgtttattgtgtcactattgacaatagcaaagacttggagccaacccaaatgtccaccagtgatagactggattaagaaaatgtggcacatatacaccatggaatactatgcagccataaaaaaggatgagttcatgtcctttgtggggacatggatgaaaatggaaaccatcattctgtgcaaactatcacaaggacagaaaaccaaacactgcatgttctcattcataggtgggaactgaacaatgagaacatttggtctcaaggtggggaacatcacacaccggggcccgtcatggggtcgtgggagtggggagggatagcattaggagatatacctaatggtaaatgacaagttaataggtgcagcacaccaacgtggcacacgtatacatatgtaactaacctgcacattgtgcacatgtaccctaaaacttaaagtataataaaaaaaagaaaaaagagacccaattgttgacaaagttatgaaaaagatagtttttaaggagtctttaagtaatattgtattttctgcaaacagacaatttgatttcccctattccaaatttcaggacatttcttcttttttcttgtcaaattgttctggctagaattacagtaccatgtagaagtggtggaaaagagcatttttgtcttgttcaacatcttagagaaaaggctttcagtttttccagccttggtataatgcaagctgtgggtttcacatatctggactttattattttgagatatgtttcttgtataccaagtttgttgagaatttctataaggaatggaggttgaatttttttctatgactttcttaaagcaattaatcataaaataataataagcaggtcaatacaagatccataaattagtggaagctagttatttgcactgctgccatagagtaggatcactacacaactcatggtgttgatgggaaactataattctgcaataattaaagactagtgatttacactgggctctattgagagatttggttgtcaactacagaaatcgagatgaaggggcactgagaaacatttcgcttcatatcatctcaacttctaatatcaatttttagtactaatacagtcctattttctcagtatactgtctcacaggttatagtatatgtcttagaaaattaagggttgtttcattctaataattaactcagaaaaattcatttcctattatggatgacaagtgtaaattcatatcttaataattacccacactccaaaacactactacaggcaaaggcaagagaaaggcaggtatagatgagattctctgaggtcagttatgtaaatacccaaggactattgtctatgaccttgaatgtcactttcttcccttccatgagctacatccaggatattctgtgaatctgagagcgttgagcatgtttaattattttatctcactgccccttagtcttgctttctccagttgacaaccaaatctctcaacaataggcccagcgtaaatcaccagacttcaattattgtagaactatggtttcccaacaacattatgagttacaaaatgatactactttatggcagcagtgaaaatgatgaacttccactaacttatgaatctctgaatggctagcatggaggtgtgtatgtatcagcgcactgttctagaaatgttccgtttctgtccattattttatgtagtaatgaggacaacgtgaactaaagggagtatccatggccttataagcacagagaccacatccagtgcaggtgcagagcaaggctgcaacagtcagcaagttgctctctgaagagtcttccaattcccttgcccaaagcatctgctcattcatgggctgagaaaagggaagtcatgcatgcagtctactctctctacagagctgacaggggacacggacaacatcgattattcatggaattttcccataggaatgcagctgtgtgcacacacacataatacatttttaaatgttttttttatttatcctctccaattttaaaaaagtcatcaccttttctcctaatcaaagaggattttgaccagaatgcttggtgggagccccctgctctcccagatgcccacccttatttctcttgaagtgaagaacggcagctctcttgatttctactctcatcctctaggactaaaaccagaaggttccacgccccctgggtgaacatccaagaagaccctgtctgtagcagcaggagcctcaagccttgactgagagctatggtcctgaaatgagacagtgtcccccatggagagcacacgtggacgcccacaactgagggctcactgctcttcaccacagatgcgctcccttactgagtcctgagacctgagtgcaccccatagggtagggctcagaagaggggatgcaaatctccaccagctccacccttctctgtgttgaaaagccgagcatggggacctagttcagtgactcctgtgccccaccacatggagctttactccacgcttctcctgctgactgtcccttcctgtgagttcagtggtcagggaatccttcaggggtgaaacacctgttcttttctttgtgggcttcatcttcttatgctttctccacaggggtcttatcccaggtcaccttgaaggagtctggtcctgcactggtgaaacccacacagaccctcatgctgacctgcaccttctctgggttctcactcagcacttctggaatgggtgtgggttagatctgtcagccctcagcaaaggccctggagtggcttgcacacatttattagaatgataataaatactacagcccatctctgaagagtaggctcattatctccaaggacacctccaagaatgaagtggttctaacagtgatcaacatggacattgtggacacagccacacattactgtgcaaggagaccacagagacagagcccagggtgcctcttgtacaagaacccaggctgcttctcagtggcgctccctccccacctctgcagaacaggaaagtgtggctgagatgccatttcctgtcagggtctgggtgtcttatcctatctgactcagagccttgtcttcctccctcttctttagtaataaatggcatgacccctgttagtggttcatgcaagcagaggctgtatcctgtttgacaaagattcagcatgaaaggttcctgttacttgagccagatgcatcactgatatgtggccaccagtttcttagactcataccactttaagggaccaaatacaaatgtccatagcatatgccattcttaaactgcagaaatgatgtcaaagaagaatgtggagataagagagcaggaggaattatgaaaatctggatagcatcttctcttctagggtggaaggtatgctagtaaagtaatttaatgaaacaatcagacagatgcaatatgtcctcatcatggagtgtctcacatgggcagtgcacaaataaatttctaaaaattccataaggtagatgtgatggatgaggcttatttccacacagggagcccacaaatatccagagaagtaaaaaatctgacacttggaaagaaaattgcctcatcttgacatcagaaacccatttcaacatgtccgaggggcaatgtggaaaagaaatggaaacttcaaaaacacatttcttatgaaatgtctagctcatgtttgaacataaaaacagaattgtccatgattttagaaaaaccaacccatgacagcgagtcactacactcagaaacaccactgagtcaacagacttcagtctgtgagcaggtcagtactgaggccccaggtgaatcaaggctctcacgtacattgtacagaacccagaattgagccacacaatctataaccaagtcttctttgacaaactttacaaaaattaacaaaaaaatacaccagagaaattcaatatatgaaattcaatatacccattcaatatatggtgctggggaaattggttagccacgtgcagaagaacaaaactagacccccaccctcaacacatatatactcaacacaaaatgaattaaagacttacatataagacctcaaactataaatctactcaaacaaaacaccaggacaactcttctgggctttggcctaggtaaagaatttatgactaagaccccaaaagcaaatccaagaaaaaaatagacaaatgggacttaattaacctaaagcatttttcacagcaccggagtgaacagacaagttgcagagcgaaagaaaatttttccacaccacacctgtgacagggaactaatatgaagaatttgcaaggaactcaaactactctacaacaacaacagcaacaagaaccaaataactccgttaaaattagcagaggacatgagtagacattttcaaaagaacacataaaaatggataataaatatataaactacgctcaacatcactcatcatcagggaaatgcaaattaaaaccacaataagatatcatcttccaccagtcacaatgactattactaaaaactcaaaaatatcagatgttggtgaagatggaaaggaaagggaactcttagacactgttgatgaggatgtggatgaggacaacttctatggaaaatggtatggagatttcccaaaaaactagaaatagaactcccctttgatccagcaatcccactactgggtttactacccaaaggaaaataattttttatttccaaaagatatccacacttctatgtttatcacaaaactattatcaacagcacatatgtcaacctgagtgtccaccaacagatgattttataaaagaatatagcatatatgcacaattcaatactagtcagccacaataaggaatgaaactgtcttttgcagcaatatgcatagaactggaagacaacataattagtgacctaactcacaaacagagagtcacatgtcacatgttattatttataagtggaaggtaacaacgtgtccacaaggatatggagagagaaatgatggacaccagagacttagaaggatgggaggtggaaggtgggagcatgaggagacattacctagtgggtacaatgtacattatttgggtgatagtacactaaaagccaagaccactatggaatatagccatgtccaaaagtggcattcgtagtccttaagtttatacaagtaaatgtacacacaaataaaattaaaaatataaaataattaacagttgaccaatgatcttaaaagttgatttaaaatataatcaataaatgaaatgaatatcagttgaacctcattaaatttgaaaacgttttatactcaaatgactataagaaaatgaatgtcaagtttcagatgagaaactgtttgcaaatcattagccaccaacataagtataataagaaccctcagaactcaactgtgaaaaaaagaaacaacccatggatagaataggcaaaggtttgtgcagacatttcatcaaataagatgtacagatgacacataggcatataaatgggctcgcaacaggattttccattcgaaaaattcaaatcaagccgacagtgagacactactatacaatttttagaaattaagaagaaatacagataataccaatgctggtgagcatatcagggtccaagactctaaaacgttgcaaacaggaatgcaaaatgaaactgctactcaggaaaataatttatagttttttctaaaatcaaacattttcttaatatatgacctaaatatcccactcctgaatatttgtgtcagagaaatacaatcttagattcacaacaaacttccatttaaatgttcaatatattgtgctcacgtgtgtgtgtgcacgatagaaacaaaaagtaacatgaatgtctcaaaatttgaataggtaaaaagtaggaagtgtctattaattgaataccatcagcaataaaaaataacaaaatgactgatacacaaaccattacaggtgaactccagacatgatgctaagtgagagaagccagtctcaatgatcaaagggacacatctgtaagcaccacggtcatcctcaggtgtcagtggtttgggctgggctctctgtctctttcctgaccagacccagatgttgagctccgccacttgcagatggaaaattctactattttcaacaatgcactgaggtttgaactgcttcacagactgaacgaaacaaacacgggctcctttgaacagtgtgcagcatttgttccaaccacaagagaatgtctcccagctctgccccttctcagttttccctgcaagccagcagccctgcagtttagcctgcatctcccatgcatgcacccatctccttccaagggccttactccacaacctccacttattttgagtgcactgactggctttgaacttttccacattctgttgttattgaagttaggatgtttagagccatattaaggatcatattttatgactgaattccagtgccccctctctcctgggacagagcacgtaaccaacattctgcatgtggagacaaagatgagcttttttcttcctcagcctaggagatgagcgctcagtggagggttggatagaagcttcccaccttctcagcactccagttctggtggggagaacctctgccataggagcagagctagaaaccagggaccgaatgttcccagtgacactggacccagggtagagcctccatccacgagtggggctccatggaagaagcgagtctctggctctcagtagcttttgtccagaactgagccttaggatcgtgtactgtgggcagagtcagagggccaatgtcctggctcctggggaacagtttcctctgaagggagctgggtagaaggtgtcctgtcttcttggctacatctgtttgcagtggagtttacatcatgctgagttgggatgtggaaggaaggaggagcatcttagatcaattatgatggctagacttactgaattttgtagattttcttgaataaatgtttcttcacttgctgtatgctgtgagagcctttccaaaccctgtattttttcaaaataattttcactggtctcatgagggcatggattcattgagcccctcatgctatcaaagagaaatagaactttttttgttcactttttagagaacatccatgggttataaaacaatgggttgacttctcttccaaaactttacagataccgtcaattttcctcttgcttgtaaggttttatccagaagaatgctgtcatcattttttctgcttttttggaaggaatgccccttctactcacctcaaattgcctgcatgtatttctatttttctttggttttcagcagttttaataagatttagctaaatgtgtgtggggggagcagggagtgtcattctgctgttctgtgttctctgagatgcatggattcacggtttactctgtctccattttggggaacacaattagaaaaaatgtcagtgtgagcccagaaacaagcctccctgaagtgggcagaggaccacctgggggcgctcaggacccactgagcacaagagccagccccagggcaggtgcagacgggggttaagatctggtttcccgtcagccctgtggcttcctctccataaaacagttccctcgggggcacgtctctggattccttatcttgttcttactgtgaagtctctgaagaataaacatttgttgtaacaagagaaaaattttctcccatgcaccaaaggcagagtcacctacagtcaattagtcctgtttctcaatgttaataaactatcaatgtttctgaaggtacattgtacagaacccagaattcagccacacaatgtatagccaagtgatattgacaaacttaacaaaatatacaccagggaaaggacgtcccattcaataaatggtacttgggaaaatggatagaaacatgcagaagaacaaaactagatccccaccctcaacacattagtcaggtctctaaaatgcaggagtacatatctaaaatttattattttattgtgcatttttacgtgttccagaaggtgggagaaatttctttctgtgaagagcatcccaaagtcaggcactcctctagaacacgtgtttaatccttgtctttggcttattgatgagctctgttggctgcaataacttctgccatccgggctgactttgcatcatgtagaggagcaaattctgaatgaaagtttgcactactcaattgagtgcataacctacagttttgttactgatgtatgattcatcagagatgatatcagatcaaggatttcaatgagaatctaatctaaaagatgtaaacaaattttcctaatttagataaaattactgtgagcacactgctagtattcagccatgtctcctatcacattgaatctacactaagtttgacctaaaagctagcacttgttctcatgttccaatatgttatttttattttaatgtattcagattactatgtgttgctattttacccaaagtgaaggaaagcaattttaactgactgaaaatgagaaaaagcacaacctaatgaaatggaagtcaggacatgagtgtctccagccttgtctatttcaaaaattcacgtacgcagggggatttctttcctcaattttacacagagaaacttccaaaatgtttgtttcctctcccatggactctatcatcagtttctatgtcagtttgcttagaattttggcctccagctccaaccaatttggtgcaaaaacatgatttcattcttttttatagctgcagagtattgcactgtgtataagtaccatgttttctttatgcagtctataactgatgggcgtctaggttgattccctgtattaggtaatgtgaattgcacagagataaacacatgagtggatgtgtctttgtgttacaatgattggttttctcttgggcatatacccagtaatgagattgctgaggggaatagtagctctgttttaagttctttgagaaatctctagactgactgaattgttttctctgtgaatggtgataattatgtcaatatttgtcaaattttgaatgtattgtttgaagattgttatttgtcaatattacctcattaaaactattaaaaatggaagtgtataatttggtagaaaaggattaaaagaaagataaaaataatacaagaaaagtcacagactcctgaatccacatgtgaattagcactcagtttttctatattatttataaaaacactaagatacagccaaataatatcatgatatccttataagaagagtgtttcgtaaacctcactgggaatttctagctctgtcctagagttaatttagggagcagtcggatccagtcctgagcaacacaggccagacactgagacttaccacatcttaccagatgtgagctcttagacacgtcacatggcctctccatgcttgggggtttaccttcacatctgtaaatgaaggaaacattgactgccacagaacatacttcatgtgcatctatacagtagaaatgctaataagaattaattgtttatgaagtgtaatcactctgggacacagcccactcagaggcatcccttccagaacccgctatatagtaggagacatgcaaatagggccctccctctgctgatgaaaaccagcccagccctgaccctgcagctctgggagaggagccccagccctgagattcccaggtgtttccattcagtgatcagcactgaacacagaggactcaccatggagttgggactgagctggattttccttttggctattttaaaaggtgattcatggagaaatagagagattgagtgtgagtggacatgagtggatttgtgtggcagtttctgaccttggtgtctctgtgtttgcaggtgtccagtgtgaagtgcagctggtggagtctgggggaggcttggtacagcctggcaggtccctgagactctcctgtgcagcctctggattcacctttgatgattatgccatgcactgggtccggcaagctccagggaagggcctggagtgggtctcaggtattagttggaatagtggtagcataggctatgcggactctgtgaagggccgattcaccatctccagagacaacgccaagaactccctgtatctgcaaatgaacagtctgagagctgaggacacggccttgtattactgtgcaaaagatacacagtgaggggaagtcagcgagagcccagacaaaaacctcctgcaggaagacaggaggggcctgggctgcagagggcactcaagacacactgaaaacacggttaacactgggacaagttgctcaggaaggttaagggctggtttcctttcagagtctttgctgtttctgtatctaacagtttccccaggaaccctgtctagatttgcgatcttgatctgcttaaactgtctctgtgtcatttttcttacctgtgactttaggggagctgatcgtggacactccagtgtgtggagatttcctggtgacagcaattgtgtgttctgtctaagcatgtctagggccggtcatcaggaaggacaggaaggacaggctggaattcttggaaacagctgcacctgccatccaccagggaactttattgtcttctgttctgctaaaattaaatcaggcacaccaagtttaactagcactatcttcctagcttaagaaaattgatggcaggtttcaataacacctatattaaaccttcagagcaacacctacattagtgtctgatttgataattgagactatgttctagccaagcagacacataaaactggtgattgccatgcttagttcatatttcatatttatcaatagaatctggctggtgttataaacagatttgccaacacatgtgtgttagtgtttgtcttcggagaggcacattctatgactggattaagtttgtgtacaggttcctaaggaacctgttcatgcttttgagaggaaatgcagagggggtggaaggcggctggggaagctgaaggtatacgagggaagtcagtccctgagtgaaggagagagggaggagaactgggtagaactttcctaaacttctgtgctggtctaggaaggtccagcaagatcactgagtcagattcgtgtcaaagtttcccatcggggacccccgtgactcccagcagtggctctgctcagatcagcacagagctcgttcttctcctgagagtggagcagaggatgtggctccagcaccagccatggcatggacgtcagagagcagccccaggcacctgagtcgggtgcattgtgccccctgcaggtggacggagggaggtgctgactcagggcccacacgctgtgggttctatacagaacacacacttttacttcatttctgtggatgacatagaaacaaacatgcagtctattaacagcggtgattcctacatttgccccaattgctttattccttgattccgcagaatatcctgacgcagaattgtctttctctcgtggaattgcgacgtgtttaggacgtgtgttccccactttcagtgttctgctccatgaacagagatcctgagtagagtacagctgaccctccttccacactgttcctctcctccccacaggaagagcagataattacctgaggctgaatctgaggtgggatctgtcctctgaacctcagagcctgcagagacccccggctgcagattcatggagtcaggtgtttgtacatgtgggaaacttgagctgttcttttgtcagtgaacactccttagaactaattgtgggttcagaattaggacacccattgatctatcacacctcagctcattctgccactcagaatctccagaaattcaggaaatggttcaatttacatgtttgtgacacattgttctcatttcatttagttgtgagtttggtcagcaaaagtgctaccatttatgtgtcccaacctgatgaagctaacttgcttcaccagatgttgggagctcctgaattttatcctaagcccctctctctccacttcatgtgaaattcggtttgacctggaattctggtgtgttgatttagccagatttccccatactgagtgtctgattttcctggatatctgatcagtttccttgtccttcaccataacttgggtgacatctgatcaccctgggctaacttcaacaaaaatcctggcaggttgccttaagcaggatttacctcactcctgatgtttcttcttgattttccatcctttgccccaaccctgctgcatgcctataaatccccacgttctcactctgtatttggagttctgctgaatctctccctcattgcaaaatcccactgccctggtccctacacctatcatgagggccctggataaagtcttccttactgtgctgtagaaagtgtctttgtatatacattttttctttaacaaatctgcctttagtatttcctaattgatcaaggaacctcaaacattgaatgaaagtgaggttttccattttactaacatatgtgtatctgtgaatttcaatttcaatgtgtggtgtccagaagtcctgagcaccaacagttgtgcttctctgtccaattatttgattctgaaacctgggagtcatcccaacacaggtaaatatgtgattttttttttttttttggtttttactgtttagtgactgacttatttcacttacactgaagcttcatgaacacaatgatgaaaagtagagagaggacttgtttgaaaatgccagatttatggtagactttaccacccacgtgtgtctggaggtcttcttaaggttccaagaacaggacatttttcccacaacaagacaaggatgagaacctctgagctgtgaggatggaggacaggcagggccatgtgtggacaaggacgggctgctgctatgtccagggtgttctctactagcaaccactccatctccttcctcactctgtggtatttgtcagatgggaaacatgcctagaatttatctttgacatctggatggaagcccaggcaagaggcatttgacagcttattcgtgagcctacttctttaaggaatgccagatcccttgctctccttcctagttcttaacccctttaactcccttcccctcctgcacccatccactgcctatttacagccacgtccccacacccttcactgtagcaccattttcttgggctcctgggaaacacaacagctttggtttaactcacagctcaggcacactcacgggtcctttcagaggctctcaacttccctcctacagtccctcagctcctcctggggtcctaacttggccatctctatcctctctgctgagcctggccatacacaatccatcccatctggatatgtgtatagcagtgggttaactcagcaggcatgaatagttcaaaccctccacgttcctaaaaaggtaaataactaaaaaataaaaacaaaagtaaacctttgttcatttatggctgtctgttacctcctgggatgagatctccgagtccatgaaatcttacacctgataaaagtgtctgcagatgtctgcagccttgggacatgctgtacgagtttaatcacagtgatttatagtgaacgcctgcttttgttttgctggggagggctgtggtctgagtattgtggtcagttacccaggtgttccatagtctatgattcattccccaaacacagccctggacaagaaaactcaggggcactcccctgggtgttgacacttcacacatgtcatcttacctcatagctggagcattacacatgtgcagaaggctccacagtgggaggacccctgagagcttgtgcctggattctcctgagcttcactctttgtgccttttttttccatgtattttcaattgtatcattttgctgtaataaactgttcctgtgaatacgagttttcatgagtcctgtgtttttactgagttttgagcctgagggtggcagatgcaacttctcaatgcagttgtatcagaagaaggatttcctagagagatcctaagtgacacatggctgaagtattgttcagaaaacataagtattcaggtgtggaatggcaaaatctgatacttgggtggcaacagaattacccggtctgagacagcagctgaactgaagtagatgtctggagataaatgcaatttagaaacgataactcatactcccaaagagctggctcaatcgatacataaggaaaaataaaatgataaaaaataacctaaatatgcaattactatttgtgagaacatccgggagagtgattgcagggaaagtggcctgcgccgacctcagattttggccaatgtcatttctggctgatgggctccagggcactacctaagggagcaattatgctgcaatgacagacagaagcttcgcaagctctctccacccagaaggtggttcaggtggtgaagtgcggggactggtgagccacaaaacactgaaatgagggaggaaagtgagaaagtgaaaggcttttgagctttttctttagcttaataatttttgttaattattaacaaaataattggacaatgactaatgtaaaagtggaccgtgttttgagtcccttagaacggaggagaatgcagcggtcaatgttgtgcccagagattactatagaacaatagtaggtggttgaacatgctccaaacacaaagcctcttgttgctgatgggacagctgccctcgtctactgcacaacagcttctccaaagtgtgtttaccctgagcattgagattgcctttctcttgtaagtgaaaaaatcggaaaactccaaataaaggaggagttgtaacgctctatgtgtaagaaattctaatgtggatttatgataactgggatatgcatccacttatctttttatctgtaaaaattcatgggtgaaagtgcaattttgttacatggatatattgttcagtgatgaagtctgggctttgaggagagtcatcatctggatggtgtatattgtacccagcaagtaatttctcatcccacacaccactcccaccatccaaaccttccaagtttccaatatttattatgccacactctatattcatgtgtgcacattatttagttcttacttatatatgacatgtggtattcaactttattcttctgagttatttaacttaagatagcagcctacagtttcatccatgatactgtaaaatacataatttcattttttattattgagtagtaattaaatgtgtgtatatatattcacaaatatatataatgtatttgtgagggtgtgtatgtgtgtatatatgtgcatatatacatatacaacatgttttctttatccaatcattcattaaaaacacttagtttggtaccgcatatgtgctattgtgaataaggcaacagcaaacataaatgcagcatctatcgaatataaaattcatttttctttgagtcgataccaagtagtggatttgccgaattaaatattagttccatttaataagagaacttaccaacatctgtttcttgtttagtttagtttttatttttgactttttaataatagttattctgactggtttaatatggcttctcgttttgacttcaaattgcatttctgtgatgattaatgacattgattgttttttcatatcctggttgatgatttttatggcctcttttgaaaaataaatgtctgatatttgctcactttttaatgtggctatttgtgctttttgtgttgctttagtttcttgtagattccaaatattagctctttgtcagatgtagtgtttaaaaatatttttcgtcattctgtaggttttctgttaactttgttgattatttattttgctgatcagatgttttgcttcttatttgtattaagtccaaataacctattttggtttagttgtgtttacttttaaggtcatagtcatgaattctttgcctagcacaatgttcagaaaaacacttcctaggatttcatttatgactttcagactctcaggcctcccagtcaagtcttttatccatattggtgtaatgtttgtatgtagtgagacatatgggtccagttttattcttctgcaaatagctgttcagtttttcctgcacaatttattgaacaaggtgacattttcccagggtatgctttttgtctggttggtcacagtcagttggctgcaggcacatgactgtatttctggaatgtctattctgttccaagtatctatggttctctggttgattgttacttgtgtataaaaatcctactggcttttgtatgcttttttatcctttattctaaaacttcactgaattaattcatcaattctaggagtacttctaaagaatattagtttttaagtacaaaatcatattgtcagcaaacacacacaaaaaactgacttcttcttttccaatttgggtgcctttatttctttctggtgtcttatttctctggctaggatttcaagttctatattgattaagagtggtgaaagtgggcatccttgacgtgttctgagtcttaggaggaatactttcaacatattgctactcagtataatgttgtatgtgagtttgtcatatatgatttttattaatttgaggtatgttttccttctattctaattttgttgagggttttttatcataaagaaatcctaaatgttatcaaatttttttttctggacctattgacatgattatatgttttttgtttatgtggtggatcacagttattgagacatgaacgttgaactatccttgcatccctgaaatgaaacttagcagattgtagcatattatctttttgatatgtagttggacttgattttcttgtgtcttgttgaggatttttccatctatagtcatcagtgatattgatctgtagtattcatttttgggtccttgcatggatgtggtatcaggctattagtggctttgtagaatgagttagggagaaaaaccctctcctcgtttttttggaaaaagtttcagtagaattactagcagatctttttgtatattggacagaattcaccttttaaaataatatgctttacggctttgatgttgagatttttttaaattactgcttcgatgtcactaatttttgttggtcctttcaggatttttatttcttcctatttcaatcttgggagattatatatttccagacatttatctattcaccctaaattttctagtttatgagcctggagatgttcatagtagactatgttgatcattatatttctatggcatcagttgtaatcttttcttttttgtttctcattctgcttatttaaattgtctgtctactttacttgcctaatctagctagtggtctgtaagttttgtttatcatctcaaaaacccaatgttttattgtattggttctttgtatttcttggttcttaactttatctagttctgctctggtctttgttatttgttttcttctgctgtgtgtttggtttgatgttgtttttctagttatttgatacgtaatgttaggttgttaatttgtgatctttctttttgatgtggtcatttaacattataatcttatcccttagcacagcttttgctgtaaaccagaggttttggtatgctgtttctctatttttattcatttcacaacatgttacaatctttttaaattttatcattgacccaaagttcattcagttgcaggttgttaaattttcattgtgtgtgtagtcttgaatattcttctagggtttgatttctggctttatattactgtggtctgagaagatatttcatttttaaaaagttattgagtcttttatttctggcatagtatataatccatgtttgaaaatattccttgctaatgggaataatgtatattctgcagtcattaggttaaatgttctgttaatgtctgttaggttcatttggtctagagtccaatttaagtctagtgtttctttgttgattttctgtcttaatgttttgcctagtattatcatttgggcattgaaatccatcacaattgtattgttacctgtgttcttccttaggtctaatagtatttgttttatgaacatgggttttctggtgcagagtgcatatatatttagaattgtcatttttaatcaatcattttatcattatataatgactttctttgtctttacttactggtgtttatttaaagtttttttatatgatatagatagtcttgcttgcttttggtttccaattgcatgaaatatattttttcaccctcttgatcttgaatctacgtatttttaccaattaagtgagtttcctgtcagcagcataaatttcaaaactcttttttattctttccactaatctatatattttaggtgaagaatttaactcatttatattcaaacttaatacagatatgtgaggtctggcttctgttgtcatgttaattattaactagtggctttgtagtcttaattgtgtaatagttttatgagtgaattttataattttgtgttgtttatgatggtgagtactgacctattgcttccatgtctaggtctcccttgagcatttcttgtaggtgcggtctggtgtaaataaatgtccttggcattttcttaccttagaaatactttatttctccttcatttatgaagcttagtttagaaggatacaaaattaatttctgacatagaattttttctttttttttctttaagtagtctgaaattgggagtccaatctcttctatcttataactttatgctgagaagtacactgtcagcatgatagaatttcagataaattattagacacttttctattgtgaattttaggatttttttcttcctatttactttagatagtctgaggactatagatcttggtaatgtctgtcttccagtgtcttctcatgtagttttctgaaccacttttatctgcatatgcaaatatctagcaagactagtgatgttttcctcaattacttcatcaaattggtcctctaaaactttttactaattttctccctcaggaatatccatgattattggctaagttgttttacataatcctatacttcccaatgattttgttcatttttttgttattttcatctgactgggttaatgcgaaatatctgtctcttaggtttgatgttctttcttctttttagtgtagcccattgtgaaagttttaaactattttttgtaattaaaattcaatgaagtctttactccctgaagctttatttttaaaatattaaagtcttaagtaaatcttgaattgttctgatttttttttttttttttttgacacggagtctcatactgtcacccaggctggagtgcagtggcgcgatcttggctcactgcaacctctgcctcccgggttcatgcaattctccttccttagcgtcccgagtagctgggactacaggcacacaccatcacacccagctaattttttgtatattgagtagagacagggtttcactatgttggccagactggtctccaactcctgacctcgtgatctccgctccttggcctcccgaagtgctgggattacaggcataagccaccacgcccggcctgagttattctgatttatttgtgttggttctcaaatttcttttggatttaattgagattccttgaggtcaacattttgaattatttatctgacatttcaaatatatcatgttgtgtaaattctatttctggagagttaaggtgatatccggcgtcttgtaattgtgttttttcatacttccacaattgcttacctgcttgcttttcattggctaaactatctcttactgtttttgaattcattttgattttcatgaaaatttcattccctttagaatgtgaatataacgtatattatgtgggtcttttgatttggttcttggtttactcattggcaaaggctctgtaagagtttcttgtatatagatagtcattatttagtggctttctgaaactatggttgtagtaataatctactgggcctgtgagcaggctcactgcctcctgcaggccctaaatagtggaggcctcagaaaccatttcttatttgcaatgcacttgtttcagcacattttatattgggatgttaagttcacctacacattagtatgtgtccttacagatttgagctgactgtggtagaagcagatgagtacatgcttgatatctgtacacagggagaagctctctgttgcctcaggcgatggactggtctatgaagtgcacagtgacttgagttctctgatcagcccctgagtgggggatgaagctggacagagatgagccaccgagcctggcaagcaaaagcgccagccttgatggaaatggcgagctgaggggcatctactcagtgtggtttcttttgttattaagagctttagtgtggtggctttttcaaattcccgttgtagtagtaacatactgagcatgtgagcaggcccgcggtcttttgcggggttggaatcacagaagtattgagaagctaatctcattttcaactgctgtacactggtggtattgagtttgtatgaggtcatgcagtttgaacgtcaggccagtaggtggtgctcgcaggtaagagccggctatggtggcagcagaagggtttatgctttaccggtggttaaagtgggaaatttgtcatgttccagatcttagagaaaagacttttagctatttctcattcattataatgctgcctgaaagtctctcgaacataactttttattatgtcgagatgtgttctttctatacccattttttacattttttttcctgaaaggatgttgagtttcatcaaatgatttttcagcatcaattgaaaaaaactatatgtcgattaaagatctaaatgtaaaatctaaaactataaaaactctggataataacctaggaaatacaatttaggacattagaactggcaaagacattatgaagaaaatgcaattttaacaaaatcaaaaaatggcaaatgagccctaagtaaactaaagagcttctgcatagcaaaagatactatcaacagagcaaacaggcaacctaaagaatggaaaataaaatatttgcaatctatacatctgacagggtctaatatttatagcatacatgcaattaaacaaacatacaagaaaaaaagtgcccaaaggacatgaaaagacacttataaaaagacctacatgtggccaacaagcataggaaaaaatgctgactatcactatcattagagaaatacatattaaaaccacaatgaggtaccatctcacatcagtcagaatggctaatcttaaaaaaataataacagatgctgctaaggttgcaggaaaaagggaacatttatacacttctagtgcaagtataaattagttcaaccattgtggaaagcagtgccatgatccctccaataacctaaaacagaagtttcatttgacccaacaatcctacaactggacatatacctaaaggagtataaacgtataggttcattccagcactattcacaatagcatagacatggaatttacctaaatgcctgtcactggcataatggatagagaaaaatgtgatacatataaccatggaatactatgcagctaagaaaagaatgaaatcatgttctttgtaggaatatgatggaactggtagtcattactcttagaaaactaattcaggaacagaaaaccagatactatatgttctcacttattttttggagataaataatgagaaatattctctcagggcctgagtcttccatattcaaaaaaaaattctaaaataagtgttcaacaagttgccgacatgcctttaaatatcctgtttcatctggaccccttatatcactcaataaagccatgagaactatatttaaaagtgggattctatgataataaataacttaacagtaagaataggaaggatatggatggttttactaatttaatgggtacataactgtggtatacactatattcctatgaataagatattctgatttcagagctaagtattgtttcctacgttgtgtgtgtgacttggttgtgttggatttgagagtgtagcacgtgcacagaccatgtggatcagaaatccacatgtaaagatgacaatctatggatgtgaactacaagtatgtaagtacttcaagtaattctatttaatggagtttgaaataaaactcaaacttattcaaaacactaattacttggtatttattttgagatctatgagtttatcaagaaattcaaattcctatttctatttaaactcccgattcctactctcagtgggagggaaaactcacagccaatcacacatcacaggacaaatctgtaaacgaagagtcattcctctgaaggtcctgggtgttcaggactctcaggcaggtgctgaggaccctgtcttgggagtgcccagcagatctcagaaccctacatggggcctgctggacactcatgtgggataactagtcgccacttattcagagttaccagtgagctttgactgttccgaatgggaccagcatggagtcaaggtgcctgctcaatgtcagagacagcgatggtctcagaaacaatccaggtaatctctaggccaataaaatgtggattcacagtgagaagtacatcctggaggtggagcttgttcttcagtgggaagagtgctgtgcacagaaagcttagaaatggggaagggggtgcgtttcctcaggcaggattagggcttcgtccctcagcgtcccactcttgtatggctgatgtggcatctgtgttttctttctcatactagataaggctttgagctgtgaaataccctgcctcatgaatatgcaaataacctgagctcttctgaggtaaatataggtatattggtgccctgagagcatcactcaacaaccacatctgtcctctagagaaaaccctgtgagcacagctcctcaccatggactggacctggaggatcctcttcttggtggcagcagctacaagtaaggggcttcctagtctcaaagctgaggaacggatcctggttcagtcaaagaggattttattctctcctgtgttctctccacaggtgcccactcccaggtgcagctggtgcagtctggggctgaggtgaagaagcctggggcctcagtgaaggtctcctgcaaggcttctggatacaccttcaccagttatgatatcaactgggtgcgacaggccactggacaagggcttgagtggatgggatggatgaaccctaacagtggtaacacaggctatgcacagaagttccagggcagagtcaccatgaccaggaacacctccataagcacagcctacatggagctgagcagcctgagatctgaggacacggccgtgtattactgtgcgagaggcacagtgtgaaaaaccacatcctcagagagtcagaaaccctaggggagaaggcagctgtgctgggctgaggagatgacaggggttatcaggtttaaggcttttttgaaaatgggttatatatttgagaaaaaaataacaatagaaacaagtacacactctaattttaagagatatattcaattcaagaattgtagaagccgaattcacagtgggaaaggccacactcaataaagttgataaaaacattccaggaaggtgctactgtgaacaagttttcaaattagatgaataaataatttggagcaatgttatttgatcatgaggtgagacagtatgattcttaaaaagtggaaaaaattctttcaaatgtttctgccactctttatcataaaattaattttagagcagttttaggattacaatgaaattgcacagaaggcatgagaattcccatgactccctgccctacacaggcagagcctcctccactatgaccatccagcaccacagtcacaaatcagttacaatggaggaatctccaaggacatttgattctttcttttttggtgatgccctaatataacaagcctaatttatctcggaataccacaagttttgttcagtggatttctaggaatcatattagttagagggaaagttggtgaggctcttactatttgaactcattcttccaaaatccacaaaacatatattaatttaaagcttatcttacttctggtttacaggatccttcccagagagtaagatttttaagattttagaggcaggttcatgtctctaaaaggccagcaagttctggggaatcccataatgaacatcctttcatgggaattggagaccctggcaatgagagactccatgtataatgccctagagttggattagatgcactgtgagctcttgggtggtggttctgaaaaaggtggtctgtgcagtaaatgcaaacacatgcacgggacacaggaaggagcaaaagcttccctttacaaagtgtgtgggcacctggaagaaaccctcacaagggcacgtctcacccttaatgactgcacattagccaggggcatgatcatgattggtcttacaaggaaagagcaccactgaggtcataggttatgaaaatgtcatcctccagctgagaaattccatctgctggcatgtgcgtgtcaaccccgtggagggtgcactctgggagttgacgagatgcatagaaacctcctgtcatgaattatcgtctaccacacagtcagaatcaacctgtgctccagaaagagatacatgcctgtagaaataaacagagcttaaggattttcttacctgctgaatatagtgcccaaaaccacactttcaggaagattagctcagaaatgtttacaaagtgactgaagggcagtggcgggtgaggtgatgggacagcctcagggctgcacttgaggagggctccctctcccatgcaggcttttcctccaggagctgcatcaggaactcacagaggataagggagaattctgagaacatgctactgtggtactgcctagagaggaaggataaatgatgacaaatacatctctgagtaacatatgggcatttgttcatgaaaactgttttttctgaaagcttatgaaggtcttgaaatgcccctgattagctgaggacaaacatttaaaccctccttccacagggagttcaagcaggctggatgtgtcctgctatggatgatcttccccagccccttcctcttcccagctcatccctggctctctgtgtaaaaagttttcatcagtggaaggtggttgatgaagtgaggtcttcaatttcctcatcttctctgtggtcatgttattttcctcatctgaggtttaaaaactcacctgcatgcagcacatgacaggctaaaatctcttgtggacaaaacagtaacaaaggcacccaccatggttgagcacccgtgttgctgacagtgaccaccaagggtcaacgtcctcttcacaatcctgtgtcagagcagcacttgagtgatttcactagcaacttcccaggagaatcggcttaaaactacttgtcgcattttccatacagatataacacatctattttcctgaagaaatagaaagagctgaatgctgaatacactgtatgtctgctggttctgcaagtttgtgactatcactttctaatttctgatctgtgtggaccaccctccagatttttctcactggtgtgaccagccttctggatgtcaaatataattaactttttttcatataaaagtcaacacaagctcctcatggtttcggtgctcactgactactttaaacttacacaatatgtttctttattagttttgttttctggtatctctactcagcatcttcaacacacccatgttaagatgcttgtacaggtaattgttaattttaaatttactggtgtttagtttaattaaataggcaggcaatagcttagaatttagaaacaacaatgtaaaggaaaagtaaatgcaataaaatttaacataagaaaaccagcagctgaaaggaagggaaatctattctgccacctaagagggtatggtgacctcatagtacaacgaacttctgcagtttaatcgatactgctcacaagtgatagcattctctctctttatatcagagcattccctaacatgtacaataaagagtgagcagatacctccaaccagactgaccagtacctctccctgagtgcctcagctgatagagatagacatcacatttgtctaacaaaataattacaggctgtaaggatacccaccagtcatatggagataatttgaaaaacttagtcaaagcccaaaccttataggtagtcatttatacttagaagaattaactcttatcttcacatgtatttttcttaatcatagagaagctactagagtcactgtccaagttactgaatatcttattcctagaatgagacattgcacaatgtgttctgacatgagggaatgtagctatagttaaaggataggagatgtgatcacggaaacacgagtctgcgatccagcagttctttctccctcacatttgcccagaaacaaagaccccagcagaaaaatggaagggttgacttcagtctccaaagtatgatgtgagatatacgtcaggtatttcatgccattgttttatagtaggaaatttaatctctaaagaaggtcattttcaggataatactattctccaggatacttaaatgcccgaaaacagagagcgctacagtgcccagtgtccaggagctacctggcacgggtctggaaaccagtggacagaaatatcagtttctcttaccacatgtatgttggaaatttgaagaatgtttctttccttcttcgtaatcataggctgcaatggactggaggtcccagtacataagaggaaatgtgtctccagtaggaacacaattagtcccataaaataattgtgctcacactgtggtgcccacactgttggaccagctgactgagaaagtgttgtaagagctgcagtgtctactgattcctatcatatttggggctacattcgcagctaccaacggaaagagagagaagtaaaactggcttaggtagagtctatggatttgctttctttccttcaaactgaagtaaaaaaaaaaatcacatcaactaaaatggggacgatgatgaagtgatcaaggacaagagccactcagtgttttaggtgggttttaacctaaagtcccacaacatgtgagaacctgaactctggagtccggggcatctctggggagaatgtggaaggtgggcgggaggaaacagtgattcatgtctagggaaatttcagggctacctgctctgggggaaaggaaagcctgagcctctccgacagtgtcctctgttaaaattgttggctgacttattgtattcttcaacaccaatatttttttagtcctcttttaattttgtttttattattatactttaagttctagggtacatgtgcacaatgtgcaggttagttacatatgtatacatgtgccatgttggtgtgccgcacccattaactcgtcatttaacattaggtatatctcctaatgctatccctcccccctccccccacaccacaacagaccccagtgtgtgatgttccccttcctgtgtccatgtgttctcattgttcaattcccacctatgagtgagaacatgtggtgtttggttttttgtccttgcgatagtttgctgagaatgatggtttccagcttcatccatgtccctacaaaggacatgaactcatcattttttatggctgcataggattccatggtgcatatgtgccacattttcttaatccagtctatcattgttggacgtttggcttggttccaagtctttgctattgtgaatagtgacacaataaacatacatgtgcatgtgcctttatagcagcatgatttataatcctttgggtatatacccagtaatgggatggctgggtcaaatggtatttctagttctagatccctgaggaatcgccacactgtcttccacaatggttgaactaatttacagtcccaccaacagtgtaaaagtgttcctatttctccacatcctctccagcacctgttgtttcctgactttttaatgatcgccactgtaactggtgtgaggtggtatctcattgtggttttgatttgcatttctctgatggccagtgatgatgagcattttttcatgtgtctgttggctgcataaatgtcttcttttgagacgtgtctgttcatatccttcacccactttttgatggggttgtttgttttgttcttgtaaatttgtttgagttcattgtagattctggatattagccctttgtcagatgagtagattgcaaaaattttctcccattctgttggttgcctggtcactctgacgatagtttcttttgctgtgcaaaagctctttcgtttaattagatcccatttgtcaattctggcttttgttgccattgcttttgctgttttagacatgaagtccttgctcatgcctatgtcctgaatggtattgcctaggttttcttctagggtttttatggttttaggtctaacatttaagtctttaatccatcttgaattaattttcgtataaggtgtaaggaagagatccagtttcagctttcctcatatggctagccagtttttccagcaccatttattaaatagggaatcgtttccccatttcttgtttttgtcaggtttgtcaaagatcacatgcttgtagatatgcggcattatttctgagggctctgttctgttccattggtctatatctctgttttggtaccagtaccatgctgttttggttactgtaacctcgtagtatagtttgaagtcaggtagcgtgatgcctccagctttgttcttttggcttaggattgacttgacattgcaggctcttttttggttccatatgaactttaaagtagtttttcccaattctgtgaagaaagtcattggtagcttgatggggatgtcattgaatctataaattaccttgggcagtatggccattttcacaatgttgattcttcctacccatgagcatggaatgttcttccatttgtttgtatcatcttttatttcattgagcagtggtttgtagttctccttgaagaggtccttcacatcccttgtaagttggattcctaggtattttattctctttgaagcaattgtgaatgggagttcactcatgatttggctctctgtctgttattggtgtataagaatgcttgtgattttttcacattgattttgtatcccgagactttgctgaagttgcttatcagcttaaggagattttgggctgagacgatggggttttctagatacacaatcatgtcatctgcaaacagggacaatttgacttcctcttttcctagttgaataccctttatttccttctcctgcctgattgccctggccagaacttccaacactatgttgaataggagtggtgagagagggcatccctgtcttgtttcaattttcaaagggaattcttccagtttttgcccattcaatatgttattggctgtgggtttgtcatagatagctcttattattttgagatatgtcccatcaatacctaatttattgaagagtttttagtatgaagggttgctgaattttgtcaaaggccttttctgcatctatcgagataatcatatggtttttgtcgttggttctgtttatatgctggattatgtttattgatttgcatatgttgaaccagccttgcatcctagggatgaagcccacttgattatggtggataagctttttgatgtgctgctggatttggtttgccagtattctattgaggatttttgcatcgatgttcatcagggatattggtttaaaattctctttttttgttgtgtctctgccaggctttggtatcaggatgatgctggcctcataaaatgagttggggaggattccctctttttctattgattggaatagtttcagaaggaatgctaccagctcctccttgcacctctggtagaatttggctgtgaatccgtctggtcctggacttttttaggcaggaatttccttgtcctaataagcccaggagtgctacaggagaccagggcttatttcatccctcagcggcgaccgtaaaagacagccatcccgaaagcagccatttcagaggcctcccctcagggatgcattctctttctcagggatgttccttgctgagaaaaagaattcagtgatatttctcccatttgcttttgaaagaacagaaatatggctctgttccacctggctcaccagcagtcagagtttagggttatctcccttgttgcctgaacattgctgttattctgttcttttttcaaagtgcccagatttcatattgttcaaacctacatgctctacaaacaatttgtgcagttaacgcaatcatcacagggtcctgaggctacatacgtcctcctcagtttacaaagattatgggattaagagactaaagtaaagacaggcataggaaatcacaagggcattgattggggaagtgataagtgtccatgaaatcttcacaatttatgttcagagattgcagtaaagacaggcataagaaattataaaaggattaatttggggaactaataaatgtccatgaaatcttcacaatttatgttcttctgccatggcttcagccagtccctccgtttggggtccctgacttcccacaacagtttattaactttgtatgactaataatgtaaaatgttccccatatttttagcaatgttttacttatttgtgaaaggtgtgtttattaatttttcattttaaggtgtcacatttatctttcttgtttctgggatttcattctagtagatatagctgaatgcattttaacaattattgtaatcatctcacattttatatttggatttgcatatacattttattaagattttgattttgatataaaatattttcttacaattgtctcttttctatttttatgagataaaattaatgtatgcataattgcatacatcttcaatgtacagtttcagggtttctgacatatgtgcacacatttgtctccagcacctaagttaggatgaggagcaggtcagtctccacaacaagtgtcctcttcagtgcttccagtcagctctcacataaggatttttatttaatttcaagttttcattttcactaatcatcagagaaatgcaaatagaaaaacgttctggtttctgtcactacagttcaattttttcctgttttgggcatcacataaatggaatcaaatgttatagttcattttttgtaaggggctacttttgctatttgtgaggttcattcatgtatttgcatctaccaaggttttgtcatcatatatatacacacacacacttatatatgtactaatgcacatataggtatttcatatctcaatcagtccattacgttaataaatgacagtttattaagtaaatccattcattaagtgaataagtgacaaaaaatatatctattttcctgttgatggaatttagtttccaaaataaatatcgtaaacacatctgttataaatatctttgtacaagttcttctgcttatatctcccatttttattgataaaatatgtataaatataagtatgcattataacttttcagctttatggagctataactgacaaataaaattgtatgaatttaaggtacaccacttgaggtattgatatacatggggaaatattcatcgtgatcaaagtaattggcatgcctatcatctcagagaatatcattttatgcctttaatttattgtgagtctgtgatgaaaacacctaagatctactcttctggaaacagataagtttataatataatattcattagtatagttacattgctgtatgtttcatctccagaactccttcaacctgtgtatcagtccattctcaaactactttagagaactacctgagactgggaaatacatgaagagaagggagttagttcactcacagttctgcaggcttagcaggaacttatagggaggcatcaggaaaattacgatgattgtggaaagtgaaggggaagcaaggaccgtcttcacatgctggcaggggagagagagaaagagcaaggggagatgcgccacacttttaaacctcaagatcttgtgagaactctaacacaagaagagcaaaggggaaagccgcctccatgattcagtcactccccatcagacccctcctacaacacttgaggatgaaaatttgacatgagatttgggtggaaacgctgagccaaacagtatcattatacccggccactcacaaatctcatatccctctcacattgcaaaatataattatcccttctcaacagtctcccagtcttcactcaattcagcattaacacaaacttctacagtccaaagtctcctctgagacaaggtaagtttcttggatgtataaccctgtaaaataaaaaacaagttagttacttccaagctaatatgagatgaatgcactgggtaaatgttcccattctaaatgggagaaattggccactacaaatgggctacaggccccatggctagtccaaacactagcagggcagtcatcaaatcttaaagctccaaaaaaatttccttttactccatgtctcacatccaggacacgttgatataagaggtgatctcccaaggcctttggaagctccacccttgtggctctgcatgttagactccccatagctgctttcataggctggcattgagttgctatgtcttttccaggcacaccatacaagctgctggtggttctaccattctggggtctgaaggacagtggtcctcttctcacagatccactagacagtgcccaagtggggactctgtgtgtggaatccaacaccatattttccttctacactggcctagtagaggtactccattagagctcagcccctgcatgagacttctgcctggatatccaggcattatcatacatcatctgaaatctaggaggaggttcccaaacctcaactcttgcctcatgtgcaccagcaggctcaacaccacgtggaagcaaccaaagcttagggcttgcaccctctggagcaatggcctgagctggaccttgaccccttttagccatggctggcacaggacagacagggatgcaaggcgccatgtcccgaggctgcacagagcagtggcgtcctgggcttggacaaagaaaccatttttctctcctgggcttctggacctgtgatgggaggggctgccacaaagatctctgaaatgccctgcggacattttttcccaccggggtccttgttacttatgcaaatttctgcagccagtttgaatttctccccataaaatgaggttttttgtctaccacatggtcaggctacaatgttttatcaaacttttatgctccgcttcccttttaaacgtaagttccaatttcagaccatctctttatgaatgcacatggcttatgttttcagaaacagccaggtcaactcttcaatgctttggtgcttagaaatttcttctgccagatataccttaaattatgtctctgtagctcaacatttcacagatctctagggtagggggaaaatgccactagtctttttgctaaagcatagcaagtgtgaccttcactccagttcgcaataagttcttcaccttcatctgacaccacctcagactggacttcattgcccatatcactatcagcattttggtaaaacccattcaacgagcctctaggcagtttcaaacttttccacatcttcctgtcttcttgtgagcactccaagcttttccaacctctgcccattacccagttacaaagtcacttccacattttcaggtatcttaatagcagtatcccactcctggtgcaagttttctgtattagtccattttcacattgctataaagactacctcagactgggtaatttatgaagagaagagttttagttaactctcagctctgcccgctaaacgggaagcattattgggaggcatcaggacgaacaatgatggtggaaggtgaacgggaagcaagaaccttcttcacatggtggcaggagagagagagcaagtgagcggggaggtgccacacttttaaaccatcagatctcttgagaactttatcacgagaacagcgaagaggaagacaatcccatgaccaaatcactttatcttaggcccttccttcaacatgcagggtctacaatctggcatgagatttgagtcggaacacggagccaaaccatatcaaccttcataacgggaagtttttaccctttgaccaacaatacccaattttttcctcctcccagcccctgcgacctactattctactctgcttccaagagcttgaatattttatactttagattctatatataaatgagatcatgcagcttttgtctttctgtgtctggcttattccacttagcataatgttttctatttgttgcaaatataagaatttctttgtttttaaaggctgaataatactcagttttatgtaggtataagccacattttatctgttcattcgtagatggacattgactcgttttccttatctagactattatgaataatctcacaatggacatagatttgtcacactcagtttattttctctagatgtatgctcagaagtggggatgctctatgtccagttcactgagtaatcttcatgttgtttttcatactggctgtaataattcacattttgttccaaaccatacatggatacctttgtaccacatattcaggtctttgtgtaactcttgaatccatttttagctgatttctgtgtattgtgtgaggtgagttctatctatttcttctgcatatggatgcccgtttttcacaccactcgttgaagagactgtcctttctctactgtgtgtcttgggaacttgacaaagatcagtttattaggaagaaatgggttggtttccaggttgtgtttaatgttccattggattatatgtctgtttaaatgccagcattataccattttgatttatatagatttgattttgaaattatagattatgatatattcagctttgttatttatgcccaaaattactttggctatttgaagtcttttatatttttatataaattggagctttttaaaaacattttgtaaaatcatgccatggagattatttatttattttattggcatatagtagatatacctattttatgggaacatgtaatatattgatacatttataaatgtgtaaagattagtgtaagatttacatatctgtcacattaaaaatgtaccctttccttgtgctgagcacatttgaatgactcctttcgctattttaatgttgtgcattagattattattaactatagtgaccttactgatctatcaaacatttaggtcttatttctcctctataaatgtatatttgtatacagtaatcaacctctccttatctccttctctcttctatccatccaggattctggtaagcaacagtctattctatcttcaggcgatccagtattttagttttgatgtaaaataagaagatgcaatatttgtctctcttttattggcttatttatcttaacataatgacttccagttccattcatattatagcaaatgacagaatattgggtttcatggctgaataatatcctatcgcatacatagattacatttactctatccatttgtccacctacagacactgaggtgctttcacatctgggctattgtgaaagagctgcaaagaacatgggaggggacatgccttcatgaggtggtggtggttttatcttctttagaacatacccagaagaggatttgccaagtcataaggtatttctgtttttaatttattttggaatcttcatactactttgcacatagtggaaacacaaatggagtaaacattaaaaaagcagtttcggttttgatgtataatccagaaacaaataatgtttgaccatgattctcattaggagtctctaatggatctggtggaaatgcaggaagttttctaaccttgttcaggaaattatgagtttgcacctttttctttttgaggcttgaaattggcatgattcatgatgcatactgttgggaggtttcagaatgatatggcaaaaatcataatgaaaaggcaagacagagagagagggagagagagagagtcaggcctagaaagagaaaaaataattttctcaacaggagaaagtgctggatatctgtatcagtgttgagttttgctcatagacacatctgtaccgagtgaggaaccatgaagtcaagggaggggtctagaacttgttcaagtgaagcatcagcatatttctcacaggcaccaatttccaccacatcacaagggtgatgcatttttgaatgccattaaatatgagttcacagtcagtaatcatgtttccatgaaattcagttaaaataccaagggtgtgtccagatcactcatgcacaaatacacaaaatttgctttttcatgtgtggctatctagagacaaagtgcactgaggagacttcagcaggttacagagatttgcttaagtttggaaaaccatagaagagtgcctttaagtgaaggttggtatataaattaaataggtcaaaatcccctctatggagtagcgttccaattgtgtggaatttttaattccttattcagttgtaaaacataatccctaggactgactccgtggagttttactgctgtgttgacaaaaatatctaacaagcttccttccagtgtttcaagggaagtttttctctaaattttttccaatgtataaattttcctggctaaagatagtaaaaggctgttaaaaacacaactggaatggcagctttaatcttttgctgattgataggagtgagcataatacatgaatctctttgagtgttctgcctcatccaaatacaataggtcaaaggctagtactggaggtaagatttccaaatgtgtttttttccagctaccaagtcataggaaaataacagatacatccttgagacagaggaccataatgccacaatgctggtaggagtacatgtagacaagggagttcaagggtttcttaaaactgataattttaatgtaagaataccattcttttaaacttatgtggaagactgtgggaggttataacaatgccatattttagtatcagccctgcctcacagaatcattttataacagttcctttcatgagtgtgcttcactcggttcatgcaaaaacctggcagatcacaggctaaaaacagaaaatatagaagcttttaatcaactgaaagagctgtagcctttgtcaaggaattattggaagacacagagaacacagatagatgataaataaaatacattcatatcccgttaagtgtggaaattgaggaaagtttacataaatgtgtccaagtggcaaactgtttatttaatctggtaaccaatttttctataaattgtagagttgaaatgcaacaaatacatatttgaaatgatctggcacaaattaagcaaatatggtaactatgtattttcactcatttttatttaagatcagcggctcagcattgatatttttgataatatctgtgactcagcagctttaccttttgaggatatgatctggtatggcagttttcttagcttcaatgttacctctttttgcattgacttccacctttatatctgccaggaatctggggaaaaggagtgcctgtaaacgttccctaacttgcccattttggtgggttttccagaatgtgtgagatgctttttttttttttttcaaagcatcctgaacccatgcactgccctgaaacatgtttatttcctagtttaacaaattggcacttctaataaatgcaatctcttctgccatctgtgctgattttacatcagatagaggactgtgttctaaaggaaatcttatattagtaagagcaattttgtcattaacctagagttttattattgaggtgtgattcataacatataatattaggtagaggttctcagtggcagtgtctaaatctcttgggtgtacagtgtcttccccgttaacatgaagcatttacgagcacagtcatagtttccagccatgcttctccctgtctcacaatcaccacaaactaactatgaccacaactggaacttggtgagttattctttaataagttttaagtttgtctttaatctttatgcctctagattattatgtgagacataatctttatgcctctagattattgtgtaaagctatttcagaagaaagttaaaaagaacattttaactgactaaacaacacaggaaatcattaataaaatgcaaagtgtagatgtgagaggctccaggcctggataatgcaagagttcatgtatgcaggcagtttctttgcccaattatactgatacaaccagcatgtcagcttcatgccccatttgactcctattatgcaagcgcatggaaatgacatgctcaagggtcacacacagatatgaaaactggtgggagcaggagaggagacgactctgcacttctcctctgaaggaccaggaaagcctggacagaccatctccccagcctccatgactgcgcgacgtgcccacatggacactcatctctgacaagataagaagactccattgatgaggctgaacattttatgatttaaattactagagacttacattgaggtttcaataactaatttttataacccaaatttacttacccccatgttgttacctctttcttcagtgaaaaattgcttttgctgtaattgagttttaggaagattcccagtgttcacaactgagcttccaagagagtgttgagaacaaaaactgaatgagggcagagaaacccatctttactgtgttcaccactaaactcaagtggactcggcactgcctttgatcactgttgcttctctgcagagttcaggtttgtatttctcacaattctaacacagactctccctctcctcaaaggtttggcctccactggctgtaaggtcacactgttctgaatttcttgtctgaaccgttttatgagggtggtgatgagccatttaatggaaattttatatcatctcagcatgaatcctatgggcggtcacgaattattattctgattatggtaattgatttttctcagcatattcattactagtgatattcaaaaaccctttttatttaaatctttgatgcttcatttttgttgctatgacactttttcttctactgagtcttcccactagcattataacatgacctaatatccagggctcagttgttatataacaaccacatatgtcaaaagctatgcattcttttcacagcagacataattttctcttttctggagatgaacacacactggctgagctacccccactcacaagaacatatggaaaatcatgacatttttatttacttgactaataaattatgtcattctctcttcaaattctttatcccccagaatgccatgacaaactcttctgcatctgttcaaaccataaactcagaaaccacatggtgagtaaaagctcacttgattcgggatattgggtcaagctcttcccctccaatgtcccacagcattgggacctcagcccacctgtccaggttctatcaagagagtttagctccttcacagtgaaggaaacaattgagttaagagggaacctgcagaagatagacaatattgaaaaccattcatatgacaagggattactatcaagcatataaaataaactcaacccaactgcaaataataatgtggctaataatggaggaataacattaatacatatttctcaaaagaagaaaagaaaaagggcagatagatgatagatagataaatagatatattagtatgtatacatacatatatcgctagaaaacactaatattcaggaaaatgcacattcacaatgagatgtcttttcatcctttatctttgcttgagagtcagaaaatctaaataaataaataaataaaacaggagctggccaggattcatagaaagggaaactcttatagaccattggtggaaatggaaattagtgaagccatcatgggaaaaaatagaactaccatataattcacaatccaactgctgagtatgtatctatttaaatcattaaagtaaaaaactaatattgaagagatacatgtacacccatgtttattgcagcactatccaccatagctaacatatgaaatcaacatatgtgtccatcaacagatgaatggataaataaaatgtgttatatttacacaatggaatattgttcagtcttaaaaatgaaattctgctgttagaagcaacatggatggaactggacaccatcatgttgagtgaaacaagacagacacagaaaaataaatacagcattttctcagtgttatgtggaaattttaaaaagttgatcttctagaagtaaataatagagtagtggttatgagatgccgggaatgggaggagactgagagacaataagaggtttgttaacaaacgtataatttacaggcagataggagggatgtgctccagtgatctacagtgcagtagggtgactgctgttaacaatatagtgcacattttatgtttacaagtagccagaagacagaaatttgtatgttaccaacaaaaagaaatgttagtgtctaagctgatgaatttgttcattgttctgatttaatcataccacatggcacacatgcatagaaatatcacactgtaccccatacagttattatgtgctaactttaaaaaatcctttaattaaaacagattttatttgcatacattacaaatgcttcaacacagagccaggaataaataccatttttctttgaaatgtgaatttcctaacaacgtagttacattcatttgaaccaaaccgtgtatttgatcatggtaagaatagacaggcttatgcatagaatgatatattttaattttagacttctacttaataccataaattcaaataattttaaaacaactaagtaaaaactataaagttgaggaaatgtgtacgtggtgtgtgatgtgtgactttttccttgcgcaccactctgtccatggtggatgtgtggtgtgggtgtctgtgtctatttctgtttactctgcttgaggttctctgtgattctaggatctgtagttcagtgtctttcacaaaactgggaacgttcttagccattatttctttcaaatactgtctctgtatctacaatttctcctttcagatttaaaatgtacatatacaatactttttaatattaatgtttactttcttcactctcttttccttgcactttactctgtaaaatttctagtggtattttaagtgagtggtttcatttaaaaggtgagccagctctactgaagggtgtgcccaaagcttactcaatgtttatactgcattgcttttgatttcttatgcatttccatttgattttttcttagtattttcaactctcagttccctatctagtccttcattatgtatacagtttccttaatagatttttacatatgaattatagttactttatatatcttgtttaattagatagttctaagatccatatcatatagaagtctcattctgatcatttgtttattatgactttggtatttctcattaatatatgtaatctttgttgatagccagatattttaggttggacagttgatattggcttattacttcattttatgcattttctgcctgtatttgaccatactttatttttgccaggcctttaatgtggaaatgtttgaatcttctcagagctacatttgacgtttacttttgcagtagacgtcatagttgaagtctgttcttctgtgtccaccagagacttcagatcctccagtgataccttgtttttctttcctgcttggctttgtctcttcaccctgttccttcctccagagaatctctttcagctccttcaggtggattaagatattatattgaactgacaattgtgaaattggtggaaggcaatagaataaagggagattttctgacctttcatgggtctatatttctacgaaggcattgtgaccctgagtctgggtgtgacattgccggtgtttctgaacttctgccagatgagatgttggtctgtgtgttcttgctgttttccctgctgtggagtcctcttgttttccccagttgttccctcccacagctccaatgttctcttttggtgttatcagcttccagagttgatgacctgacctagagattaaggctctgattaaataagaaggaggggagatacttctcaatggaacttaggtgaagacctctttttccatctcagttcctaagggatggccccagtgcccctaagatcctggctttggtggcttgctcctgcagagtaatttcttagttctgcaatggggattaaggaggtgggtctgaatgcatttcagagtgtgggctctttttctctcccagacagacacattgggacaaaagatttttgtgactgtccccatttttgggaaaaaggtttcaaggtataggaaagctcttcagtatgtggtccctgagaaattcacgctacaacacatttaccacacttgacttcaccaattcagtatgtatgtatttttttctcttataatagcctacatttttatatgccagactctgcctcagttcaactcatacccatgcctttttactctctgcaagaacttgtctctccctaaatttcggatttgatgattatcttaaaacctccagtatttaaagtatattttaaaattggcaaaattccatctcctgtgtttatctgttatgttgatgctgtaaaacagtaagtaaaatatactcctcatctatgtacattttgaagctgagttgcaggttttttggtaagacccagagtcacagagaattcaaatattgttaagctgcttaatagaaaaacaaattatggtaaatgtgttcactggaatactacccatgatttataataaataaatgcctgacacacagaacagcagcaaaaccacacatgctcttattacagaaagtggcttctgaaaaccacaccgggcacgtacagctttgtcctggagttggtttagggggatgtcagagccagtgacgagaagcacagggccagatggcagcgttcactcatcccagacatgagctcctggatgcatacagagcccccccatgtgtgggtttacttccacttctgtaaaaggagaaaatactgactcctacagagcataatttacacattttttaaaaaatgtaatagggtgatcagggcaaagtgtttatcacagcacaatttcataagacagcatattttccaaataccatcattgtcagcaaacttctgcagagcaccgtcttcttatatgggtacagcctattcctccagcatcccactagagcttcttatatagtaggagacatgcaaatagggccctccctctactgatgaaaaccaacccaaccctgaccctgcaggtctcagagaggagccttagccctggactccaaggcctttccacttggtgatcagcactgagcacagaggactcaccatggaattggggctgagctgggttttccttgttgctattttagaaggtgattcatggaaaactaggaagattgagtgtgtgtggatatgagtgtgagaaacagtggatttgtgtggcagtttctgaccttggtgtctctttgtttgcaggtgtccagtgtgaggtgcagctggtggagtctgggggaggcttggtccagcctggggggtccctgagactctcctgtgcagcctctggattcacctttagtagctattggatgagctgggtccgccaggctccagggaaggggctggagtgggtggccaacataaagcaagatggaagtgagaaatactatgtggactctgtgaagggccgattcaccatctccagagacaacgccaagaactcactgtatctgcaaatgaacagcctgagagccgaggacacggctgtgtattactgtgcgagagacacagtgaggggaagtcagtgtgagcccagacacaaacctccctgcaggggtcccttgggaccaccagggggcgacagggcattgagcactgggctgtctccagggcaggtgcaggtgctgctgagggctggcttcctgtcgcggtctggggctgcctcgtcgtcaaatttccccaggaacttctccagatttacaattctgtactgacatttcatgtctctaaatgcaatactttttttgtcctttttgtttctttgtttttttgcaacaggagtacatatcctcagctccacagaagccagggtgtcactttgggggcagaaataatcgtttcgtggtcaacaggatgagagtcctgaggaatcccagggaaacctggagagtgttttccaattagactcagggcagagacctccatgggaatttctgattagaacgggctttgagctctgatgggagccaagagacaggctcacccagggtcggggtccttaaagcctgatggttttcacagctatcccccctcgtcttgtaaactcagactgattcagttgaccctttttctgctaatccattttgcttctctgtaggtttgattctcacagttcgctttcttcttctcttccctgagaacaaacgatgtgttttctgttttcagggaaaatcccagggctcaggtctgcaggacctgggtaggctgaggagactttctcactcaccattgtctggacactcctgttgtcttctgtgcatggaggcatttgggaaatgaagtggacattagtcattaagggaataatactagttttctccaattggatattgatgtagagctgaacttgtgcttctcacactgtcacagagtttggaccctcacctataactttgaggagagttgatgatggatagtccattgtgggtgagctctgggtaacagtaattgtagggtctggctaggcagcctaaggtcaatacttctggacctcaggaaagacaggctggaattcctgggaagacctgcatctgccatccaccgtggagtcccatcatcttctgttatgctgtgattgaatcagccccacctagtttatctagaacactcttcatgacttaggaaaacataatggcaagctctcctaacacctgtatcatgccatgggagcaacacctaagctagtgtgtgattgagtagatgagactgtgatctagtcaagacgacaggtaaaattgattgttgtcattatgatattttatatttggcaatataatcatgctcatattataaatacttttgctacattttttgagtgtgtcagaggctttggaactggaacaacttcatcttgaataggggctaggaaaaataagaccgagacctgctgggctggattcctagtaagttgatgcagtaagttagtcacaggatgagataggaggtctgcacaagatccaggtcataaaggccttgcagataaatcttacagtaaagaagctgggcaaagccctccaaaaccgagacagtggctaaaatgacctcagtttgtcctcactgttcattatactctaattataatgcattaacatgctaaaaaacactcccttccagcccccaagacagtttacagttgtcaaggcaacatcatgaagtttccttgtgtggtttaaaaaggaggggaggaacactcaacttcaggaattgcctggaggactcatgaataatccatccattgtttaacatataatcaagaaataaccataaaatggacaaccagcagcccatactgctgctccacctctggtgtagccagtctcattattttacttgcataagaaacttgttttcattttaatctgtggattttccccaaattgggacccctttctcctaatatttgtgctattattcgtgttctgagcagaaaaccccaagatggaatgaagtttccctacatttttataagaagtacattcacccctttgagcgaaaatgcacagggagtggaatgaggctgggaagctaatggcgtatgatggaagcttgtccctgactggaggagagagggagggaggattgggaggaaggttcctatatttttgtgctatgcaaggaagctgcaaaagataactgagtctcgtgtaagtcagtgctacctctcaggggatccctgtgactccaagaaagggctcttcttaggaatcactgtggagtcagtcctttcattagagtagaccacaggacatgggcctcagcacacgccatgccacagatgtcagaaagcagctgctgggaacctgatccacctgcattttgctgcctgtaggaggagggagggaggtgcattctcagggtcagcacactgtttgtgaatttttatagagaacccctgcttttgctgtatttttattggaaaatatatgaacaagtgtgcacctgcaaacaactgtaattttcacatttccttcagttgcattatttcttaatcctgaatgacgtcctgacacagagttgagtttttcacaggcattgttcgaaggatcgagatgatggcattttccacattcactggtttttctccatgtggcagagaccttgagtagagcacatctggcccttatccacactatctcttgtgtcccctgggaaagagcagagatttgcctgactgcagaatctggggtaggagtctgcacacctctgagcctgcagagaagctcagcgaagttttgtggagtcagagagctttccgtgtggggaacctctagcttcctcactctcggagattaatggtcagctgtacttgaggggttaagaattagagcaccttgggagcctgtctcatcacagttccattatgtaacttaccaccattagactgcgggtaataactcaatcttgatttttctgacccgattttttcatcttattcattactaattttgtttatggaaaatgttatgtttagtttatgattaaaacctcagaactttctgaacttatcaggaataatacaaatgtgtccagtttgggggaaatgtaaatgaatgtccatgcagtttgggtgtgtgtgtgtgcgtgtgtgtgtgcatgtgtgtttgtttgtgtgtgtgtggatatgtcagtcacttacaccacaatgaacatgattgctgaattacatagtcaaactaaaattagatttgctgaaaattgcctgcagcgatgtctgtgaagctgaccctgtcactttgctgtgaagaaactcagtgtacaggcgaggttgcacgggagagctaaaagcttctgcacacaggacaggctgagctcctgaactggagccaggcacaggactgagcacctgagaaacagaacccccagccctcctttatctgggctggatgggcaccagaggacccgcaggagatgctcagaactcacacaagacagagcctcagtgaggagcagaggcagcgaggaaccagtccagggagccctgtgaccgccacctcgggttgtcttattttgcttaacagcatccaaacctcaggagaccatttattacgttatttagacttccatgccctttctgtcccgaagtaaaacaaacataaatatgactctgcagttagctctttgaacctgggttatttttctgagaatgtcatcttcgtcatcaacatcatggtcatcatgtcaaaatcaacaggcaaatccagtcaccgtgaagacagtttcatggcatgattcatacacaatcattccattccacagagaatctctttcagattcttaaggtggattaaagtgttatatttaattgccaattgtgaaattggtggaagacattatactaaaggaattgtctctgacctctcatggggtcatatttccagaaaatcattgtgatcctgagtgtgagctgactttccaagtgttcccaaccctcctccagatgagatgctggtctgtgtgttcttgctgcttcccctggggcagattcctcttgttttccccagttgttccctcccacagctctcataatctctgttggtgtccccaacttccagatctgctgccatgacctgcagattaaagctctgattccgtaagaaagtgaggggagctgcttctcaatagagctttgatgggaacctctgttcatacctcaattcttaaggggctgcaccagtgccctaggatgctgattttcatggcttgctcctgcagggtaatatcttagttttgtagtggggatcagagaactgggtctggatgcatttcagaagtgtgagctcattctctcccagacagatactatgggaaaggaagatgttttgcaggggtaaatgattcaagagattagggcaactctccagtatgaggtcccttagaatttctcactataacatgcctaacacactcgacttcaagcaatccagtgtatatttgttcttcatcttgtaatagcctacattttatatgacagcctctgcctcagggaatttcatactctggcttcattactctctacaggaacttgcctctccctagatttcaaatattttgtttgttttcaaccctcaattatctgaagcattaagtaaaatttgcaaacttccatcttttctgtttatctgttattgttgatactattgttgtaagaatgaatatatgggcccggcgcggtggctcatgcctgtaatcccagcactttgtgaggccgaggtgggtggatcacgaggtcaggagatcaagaccatcttggctaacacggtgaaaccccgtctctactaaaaatacaaaaaattagccaggtgtggtggtgcgcaccagtagtcccagctacttgggaggctgaggcaggagaatggcgtgaacccgggaggtggagcttgtagtgagctgagatcgcgccactgcactccagcctgggtgacagagtgagactctgtctctaaaaataaataaataaataaataaataaataaataaatatgtgtgtatatatatatatatttctcatctatgtacatttttaagcttagcagcatattttttagtgagatccagaataataaaagaatccaaacatttttcagctgcctaatagagaaacaaattctggtaaattttttcactggaatactactcaacatttataataaatatatttctggtacacagaacagcaaggaaaagtatctaagtatttatgctgagtaaaataagccagacaaataagaatatgtactatattactccatttatgtaatttatttcaaatgaaaaaaatctaaagtaatatacaaaagatgagtagttacctgggaaaagggtagaataaaggaaggggaaatgtggaaacatacagaagaacaagagaaaatgttgaggggaactcacttgtccacctcagtaatgatgacgcttacatcatgttttcaattctacactttaaatacgtgaagtgtattatctgccaattaacactcacaaaatttattgcaagcaaacaaatgaaaaattagaccaaaagcggtggtataaagatacaaaatatccattaaaagtcagaaatatatgagaatttgcctcctgaaccctagttctctccttatttttaggtgaatgctagagtgccacaaaaatcactcaagttctcaatacaggaagtgggttccacaaagcacactaggcatgtccaattcttacctggagttggttcagggagtaactggggccactgatgtggagcacaggccaagctaccagggctcattcatctcagacatgagacacacacagcccctcctccgtgtgtgggtttatttcacatctgtaaatggagaaaccattgacttctacagaacataatttacacaaatatgtaaaaatataatagtgcaaaatgtttatcacaacacattttcataataagacagtgtattttccaaataccataattgtcacccaattcctgcggggccctgtcattttatctggggtctgccatctcctcagggttcccaccccagagctctctgtgtagcaggagacacgcaaatagggccctccccatgctgatgaaaaccagctaaaccctgaccctgcagctctggcagaggagcctcagccccgggattcccaggtgtttctgcttggtcaacactgaacatacaggattcaccatggagttggggctgaggtgggttttccttgctgctattttaaaaggtgatttatggagaactagagctattgagtgtgaatggacataagtgagcgaaacagtggatatgtgtggcagtttcttaccaggatgtctctgtgtttgcaggtgtccagtgtgagatgcagctggtagagtctggagcaaacttgacaaagcctgggtgtccctgagactctcctgtgcagcctctggattcaccttcagtagccatagcacgcactgggtcccccaggctccagggaagggtctgcagtgggtcccagttattagtggtagtggtagtaccatgtactacgcagactctgtgaagggccgattcaccatttccagagacaataccaaaaactcactgtatctgcaaatgaacagactgagggcagaggatgcagctgcatatgactctgtgagagatacggtaaggagaagtcagtgtgagcccagacacaaacctcccttcagggtacctgggacaaccagggaaagcctgggacactgtgcactgtgctgaccccaggggcaagtgcaggtgctacaagggctgggtttcctgtcttgatctggggctgccttgttaccaaattacccgagggaacttctctagatttgcaattctgtactaacatttgatgtctgtgactgctaaacttccctcacatatttgttttttgtttgtttgttttgttttgttttttgtaacaggaagacccatcctcacccctacagaagcccgagtgtcaccttgggggcagaaatgaccctgccttggtcacattgatcagtgtcctgaggaagcccagtggaacctggggagtgttttccagtcaggctcagggcagagacctccgtggaaatctctgattagaataggtttgggattcagacttgggccaagagggagtctcacccatgggagggtccttaaatcctgacagtttttacagctgttctccctcctctggcaaaactgtgcacatctgactcagaactgatccagctggcccttacttgctaatcaatttttcttctctctacacttcattctcatagttcccttttcttcccttcccagaaaacagagagtgtgttttctgtggtctaaatctcagggctcaggcctgttacctggaactcaggtgtggcccaggctgtggctcctgtgagacctggggaggctgaggggactttcccactcaccattgcctggacccgcctgctgtcttctgtgcatggaggcatttgggaaatgaagtggacattagtcactgaggggataatggtagctttctcaaatgagatactgatgtagagctgatcttctgtttctcacactgtcacagaatttcctccttcatctgtgactttggggaaagctaaggatggacactctattgtgctgtgagctctgggtgacagcaattggagggtctggctaggcaaatcctacagggtttcaggtcaatggagttggaatttctgggaagacctacactgtcatcctccatggagtcccatcatcatctcttatgctctgatggaatcagccccacctaggttatctaggacaatcttcctgacttaggaaaaaaatgatggcaggctttactaacacttatattataggatcagtacaacacctaggttagtgtgtaactgaataaatgactctatgagtcaaggggacacataaaattgattgttgccatgacatttatttatttatttatttatttatttattggaaaccagagttttattgttactgaaatgagtctcgccaagcattcaagaatgggattttttaaggatagcttggtgggttgggggcagccagtgagtcatgagtactgattgatcaggtcagagataaaatcatagggagctgaaggtgtcttgtgctgagtcagttcctaggagggggccacaagatcggatgagccagtttattgatctgggtgatgccagctgatccatcaagtgcagagtctgtaaaatatctaaagcattgatcttaggctttataatagtcattttatccccaggagcaaactaggaagggttagaatttgtagccaccagctgcatgactcttaaaacataatttctaatattttggctaattcgttagtcccccaaaggcagtctagtccccaggacgaaggagatttgttttgggaaagggcagttattgtctctgttttaaactataaactaaactaagttcctcccaatgttaggtaagcctacacccaggaatgcacaaggacaacctggaggtttgaggcaagatggagcaggttaggtcacagctctttcactgtttcagttgcagctttgcagtggtggcttcaattcctccctttgagttttgaccttatcgacttgttttgtttctctttaagtgatggttttataaccatctatgaaactctaacaggtgctctcacatgcagatttctgattaaaaactctgaagatggttacaatagtatagagataaaactatcaaatagaagactatcttttttgacttttcacttaaaatgttgcccaagaaaacttttcttttgagctatttatagctttcaacaattgagtatagtcctgtacataaaatttggagaatatttgtttctctctgtccactttctccagaatttggaaactctttgtgaatatccttaacttatggcaatatgatttttcataagtgcagtaagattttttttttttttgcaacaggacacaattggagaaactggttattttaccaaggctttgactgtaatggcgtgcttcaccttaagcaatcgaacttgacttatacagccaataagagccccttgggaaaactggcctgtaccttgtccacacagtctttgtacaaggttcctgaccagtggtaagtaaagaatgtcactttctaacaggcccaagaaccccatgttttcctgggaccccagaggaaaaataatttaccagacttacaggtatttgatggtaaaaactcatggctgggcttggctttaaaaaagtcttatctgagattccttatggaacagagttccaccaaagccaattttaaaagcctgtgtaaacaataattatttgtattgtgctttatgcaaataataaggccatgaataataagactaaagtttattttgcaaataaatcagtcctatcttgatttgttttaaataaaaatggggacaagagagaaaaaaattatgctttaaaaatatagtacacctgttgtttgctgttcttgtttttttttcttcagcagtttggacgaaattctaaattatttgtaggctacaaagccataaactaatgcgttcaaatctttacttttaaaactgcgaattgcactccttaccccagttctcattatgtactttatagtatgttgttccctccaatgtggtgctggaattatagatgacagcactgacagctttgccatgcaagccttggaaccccacgcaggcctgcgtgagtacactcagacagttgcaatgaggttccagtcctcttatcttgaggtcagcacctacccctactacgccccaggtcatcaataaaaagttgtaacagtcttggcccttcttacatcttcattatccaacaccatgatttttgttttttgccaaaacaattgccaaatatagtcataatcataggataaataattttgctgaaatatatgtgttattattggtcttttgagatggaaagtccaagactggattatgctttcatgcatttttcataagaagtacttccactcttttgacaggaaacgcacagggggtgacatgtggctgcagaagctgatggcatatggtagaaatctgtccctgagtaaaggagagatggacggaggattgggtgaaacattcttaggtttctgtgctgtgcaaggaaggtgtaaaacatatttgagtctactacaagtcaacattacccaagggggaacccctgtgactccagcaatgactctgcctcagaatcactaaagagtccttcctttcattagagtggaccacaggatctgggccatagcatagacgtcagaaagcagcagcttgacacctgatccatgtgcattttcctgcctttaaagggagggagagaggtgtattctcagggtcaacacactctttgttgatttttacacagaacactggcatttactttatttcattgaaagatatatgaacagatgtgtgtctgcaaatgattgtaattttcacatttattccaattgcataatttttaaattctgcttgatgtcctggcacacagttgtgttttctataggtatttttcaataaatcaagaaaatacattttccactttcactggcttttctccatgtgcagaggccttgagtagatcatgtctgactattagtctgttttcatgctgctgataaagacataccagagacttggaagtttacaatagaaagagttttattggacttacacttccacatgactggaaaggcctcacaatcatggtggaaggtgaaaggcacatctgacatggtggcagacaagagaagagagcttgtgcagggatctccctttttacaatcatcagatctcgtgaaactcatgcagtattacatgaacagtgctggagaaacccgcagccataattcaatgacctaccactgggtccctaccatgacactgggaattatgggagttaaattcaagatgtgatttgagtggggacacagccaaaccatattattttgccccatggcccctcccaaatctcatgtcctcacattgcaaaaccaatcatgcctttcctacagtcccccagagtcaacttgtttcagcgttaactcaaaaatccacagtctaacatctcatctgagacaaggcaagtcccttccacctataaacctgtaaagtcaaaagcaagttacttcctagaaacaatgggggtactggcattggataaacacacccatccaaatgacagaaattgcccaaaacaaaggggccctctgcaagtccaaaatccagcagagcagtcaaatattaaagctccaaaatgatcccctatgactccatttcccaaatccaggtcatgctgatgcaacagatggtttcccttggtcttgggcagctccacccctgtggctttgcagggtacagcctccctcctggctgctttcacaggctggtgttgagtgaatgtgccttttccaggcacatggtgcaagctgtcagtggatctaccacactgggatctggaggatggcggccctcttctcacagctgcactatgcaataccccaatagggactctgtgttggagctctgaccccatatttacctttctcactggcctagcagcggttctccatgagggtcccactgctgcagcaaacttctgcctggacacccaggtgttttcatacatcttctgatacccaggcagaggttctcaaggaccagttcttgacttctgtgtactcactggctctacaccatgtggaagctgccaaggcttggggtttgcaccatctgaagccatggcctgagccctacattggcgtctttcagccatagctggagtggctggacacagggcaccaactccttaggctgcacacagcacgggcaccctgggcctggaccacaaaaccacttttgcctcttaggcctccaggcctgtgatgggaggggctgccgtgaagacttctgacattcacaggagacattttccccattgtcttgaggattaacatttggctcctcattacttatgcaaatttctgcagctggcttgaatttcacctcagaaaataagatttcttttctactgccttgccaggttgtaaattttctgaacttttatgctgtttcccctttaaaactgaatgcctttaatagcactcaagtgggctttttgaattctttgctgcttagaaatttcttctgccagacaccctaaatcatctctctcaagttcaaaattccacaatttgctccagttcccaatgagttcctcatctccatctgagaccacctcaagctagaccttattgttcatataactatcagcatttttggcaaagcaattcaacaagtctctaggaagttacaaactatcccatattttctggtctttttctgagccctgcaaactcttccaatctctgcccgttacccagttaaaaagtcacttccatatttttggttatcttttcagcaatgtctcactctactggtaccaatttactgtattagtctgttatcacgctggtcccaagactggacaattcataaaagaaaggtttattggacttacagttccacatggcttgggaggcctcacaattatggtggaaggtggaaatcaggtctcacatggtggcagactagagaagagtgcacatgaaggaaaactcccctttttaatccatcagatctcatgaaactcattcactatcacacgaatagctcaggagagacccatgcccataattcagtcacctcccatcaggttccttccatgacatgtgggaattgtggaagttacaattcaagatgaaatttgggtggggacacaaacaaaccatatcactgaccttctccgcatcatctctcatgaccccagagaaagagcagagatttgtctggggtaggagctgctcctgtggaacttagaggctgcagacgaccccagtgcagttttatggagtaagagagttttcccatgtctgggaacttctagcatacccactgccagagattgctggttggctgttattgaggggttcagaattagatcacctggtagcctatctcactgcagccccattgtgtaacttaccaccaatggccttcacgtgaggactcaatgttaactgttctgacctcattttcttacctcctttatttgtaagtttggttacagatttttttttactttaatttcagggatatgtgtgctgaatgcgcaggttttagtttcttattcaagccttataattgctcaactgatcaggaataatacaacatgtatgcagttttggggaaatataaatgaacatccatgcaaaattttttgtttggatatgtccgtcagttacacccctatgaacataatagccggtcctcaccagaaattgctggtcctcaccgatctcaaaagcatctagatcttcaacttcctagccttgagaattcagaaaacaatgtttatgatatttctgagccacccatttaatggagttctgttatagcagctgaaacagactaaaccatttaccaagtctcagtaagggcagtgaggatccaccatgcttgagagacaagcattactctctcatttgcagctcaggatgacagaagcatgatcatgagctgatctgaaaagaagatgtggctttctctccctcggatctcagttgaagccatggtgtcacatctctatggtggagactaaattccagtctgtgatgtaatggatgcctgcctcctcccaccctcacttacgagacagagtttccatgccatgcgttattgaccaagaaccaagaaggactccaattattctcacccctgctcacttgtatggcagaggttctggggatattcctgggagaggcataatgagactatttaagtccacgattcccaaacagttttatgctcttaaagcaggagtatcactttgagatatatgaataatttcatgtgcactaaggtggaggctgttatatttttataggtaaagatgcatggcataaagacagagatacagcactctggaaattgtgtgactatgtttgcagttgactgtgaataatttttaccatgaagttatcctaaaacacataatatatttttactgtaagtaattaatgaaaagctgacagctccacaagagcaatatccacttggtttagcagagagaatgagaaatagcataatttaagaataatcagttagacactgtgccatgtgcctgtattttcaactagtgaggatgctaatgtgggaagatcacccaagcccaggatttcaaggccagcctgcaagatattgctagacccattttcttaaaaaaaaaaaaataacattctgggtcatgacaaacctcaaaaactgaccctctaaataggaacaaatttaattgcattaaaatgtggatgaatttttgacacaaaacagtgacagcatgccagcaatgagtacagaataacatccagttgttatgttaagagatacagactccgaaaaagagacatcaggtagaggctgtcaaaggcctcactgcctaatgactgcttttccattgatactgtgtgtatatcccggaatgcacctgtgaatgaggacatcatgtctttcatagtgtgagagaaagagacattactacccatctgacaaaggattgatcagaatataccaggatctcagacaactctataggaaaaatatctagtaatccgaataaaaagcaggcgatatttatttcttaaaataagactttcaaattgcaaacaggcatataaaatgtgctgtgtaacactgatcatcagaacaatgcaaaacaaaactacagtgaaatatcatctcatctgattttaaaatgatttcatccgaaagccagacagaaacaaatgctgggaaggatatggagaaatgagaacactcataacctgttggtgggcacttaagtttataaaaccactatggagaacagtttagagtttcctccaaacctaatagtagtgttgtcatataatccagcaatcctgctgctggcatgtactccctcccacaaaaaaaaaatgttgtttgcactaccatgtttgttatagcactgttcgtaatagccaaaatttgaaagcatcctaactgcccattaacagatgatggataaataaaatgtggtacatatagcatatggattaatattatgccataaagagaatgagattttttcatttgcaacaacgtggatgaaactggagttcattatattaattgaaataatcccagaaccgaaagacaaacttcacatattctcatatatttgtggaagttaaaaattaagacaactgaactcgtggagatagagagtgaaaggatggtcaccagaggctgggaaggtctatggtagatggggattattggggatgctcaatggatgaaaaaagtggttagaaataacaaataatacatagtatttgataacacaacagactaagtataatccttaataacataattatagattgtaaaataactaaaagtgtataaatggaatgttggtaactcaaagaattaatacttgaaaggatgtaggaaccattcatcataatgtgagtattatgcagttcatgctatatcaaagtcaggtaccccataaatatacacatataccatttacccacaaaaattcaaaattaaagtatttatgtatctcatcttctgtatctatattacattaaacctaagaagatactggtttcttcacactaccaagatccacatagacatccgtagcttctttctttgcctgtccataatctgacattgaaaaatgaggaaacctttcctatcatatgacattaatttacttagtgcacaatttcaaaatacacaaattgtgttagaattattaaactgacccttgttgaaaatatgtttatcgactagaataccgtgcttatatgcagcttatttatattttacaatcacaacatcaaattatttccaaagatacttgtttctgatattcatgcccccctttctgcagtgaaattagtacaaacctgtttatcattgttagatatttttatacagctttcattttattctgtgtttcatgaccagctaaatacttttgaagttgtatgcatttaggttaacactttgtctcaaaaaattatgagttttcacaaattatttatgccatgtgtttatcattgaacaccatgaaaatagtttcattgtgattaaaaagtgtgtgtttcacctaatccacacaccttttccccagattcctggaaaaccacaaaggtttactggatctatatttttgtctttggcaaaatagcctggctattctcttagcttcttctgcaaagcatcaagattcaccttcactgactgcagcatttattgggccctgatggctggaggagaggggctggagtgggtggtagccatgagtgacccaagtggaagttctcagtggtgctctgctccagcacaaagaagattcacagttcctggggacaacacttaacatcacaatctcccttaaaattatctactggaaagctgaggagtaggcagtgtattactgtgagagacacagtgagggacatatgggtgagtctagacgcaaacttccctgcaggaagacaagaggggactttgtggtaaatggtgctcagaaccactaggggacactcagaaccactaggagacactcaggatagcagaaggtgctcaggatgccgcagggtgctcaaaacactaggggtgctcaagaccagcagggggcactcaggacaccaggagacacttaggacatcagggggcgctcaggacaccagggggcgctcagcacaagcaggggccacagaatgacaagggtgcattccagaccaccaggaaacactcaggaccaacaagagattctcagaaaccaccaggtgtaacaggaccacctaaaggcccacaagacaaccaggagacactcatggccactgaagaacattgaggacaccaggggttcagggccaacagggagtgctcggggccaccatggggctttcagtaaccacgagggaatcaatcactcaggacaccacggttttcttaggaggcagctccacatcaggtgcctggggaaggtgacgtttgcttttagacctagctgattcctgagctggtcaagcaaaagtcttcccacgatctctcactatttcttccttgtaacccatggtttctttcacatacaaatcattaacttaggataggaattcaattcaacttttaaccttgcatatttttagaataataatagcaatagtaattcaatgtgttttgataataagaaattgtgtatgcctaattcaaactctggttccacgcatgggtttttgtttcttgtgctgtgccagtcacactacagtcaatgcttttctaataataactcaacaatgtcacggtgttaagtttcctttcattttgtctgccatttgtggagatgaaacaccactttcacgggtcagttcctccactttggttgggttctggtcttctgctcttcacactgtttctccaccttcccttctgtcaaatccttttgtcttcctcagtctcctggcaaagaagcaacaaatctatttattttgtctcctccacgtctggtgaatctgttcacttctcttcatgatcattgaacccaaccatgtttagaaggataacagttcaccttacaatatgctcatgtaggtcaggtgcagtggctcactcctgtaatcccagcactttgggaggccaagacgggtggatcatctgaggtcgagtttgagatcagcgtggccaacatggcaaaaccctgtctctactaaaaatagaaaaattagccaggcatggtgtcgggcacctgtaatcccagctactcgggaggctgaggcaggagaatcacttgaacccagggtgagaggctgcagtgagctgagataatgccacttaactccagcctgggcgacagagagaaactccatctcaaaaaaaaaagcatatgttcatctatccgcagactctctgacatcgtcacccttttctagggtcctgcagacatcaccccacaacatccagtccttttcctaagtaccacagagtgggctctgcagctcctgctgctctctgtgtgctcagcgctgaggctcaccagtgctttgatgatgaagttcaaatccctaatgtgtttgcaattctcagacaaccctctagcaagctgccattgtgagtgcattctggggatcctgggctgatttcaggtccatattgctggatgttctctagcatccaggcgtgttggcaaataaacatctagaatttgtattgaaaatttgtggaaaatcaatggtagaaaacaatcctaatttctaaataagaacattttatcctgactttataaaaacacaatgttaatttaaccaataatgtaataaaatgtgtttaaagtgatgtttatcttgttattagatgtattaataattggtattttaaagtatactaacagcataaatgacaaacaaaccaacacagcgattatacataaataccattgtacattaattaatttggcaagaatggcatttattttcatttctaccaaaccttgcctttaaatatgtttgttaattggcattaggatagtgaaacaatcacacagagcaacaacattttggaatattacattatactataaaatagtacattcgattcaattatataattaaaataacattaaataaattcatgttttggtttgatatttggatatgtgttcatttttgtattttctttttttgtatcttttgtagagatggggtttcaccatgttggacaggctggtctcgacttcctgacctcaggtgatttatcgggggaacccacccccaatatttcaatgtagggtctttctattttctgtaagtgtcggctggtctgagaaataaagagaaagagtacaaagaaaggaatgttacagctgggccaccgggggtgacatcacatattgataggtccgtgatgccccctgagccgcaacaccagcaagtttttattagggattttaaaaggagagggggtgtacgaacagggagtaggtcacaaagatcacatgctttaaggggcaaaaagcagggcaaagatcacatattccttccccagggtattaattactaatattccttgctgggaaagaatttagtgatatcttccctacttgcacatcagtttataagctctctgcaagaagaaaaatatggctctattctgcccgaccccgcaggcagtcagaccttatggttatcttcccttgtttcctaaaatcgctgttgttctgttctttttcaaggtgcactgatttcatattgttcaaacacacatgttttacaatcagatttcatattgttcaaacacacatgttttacaatcaatttgtacagttaatgcaatcatcacagggtcctgaggtgacttacatcctcagcttacaaagataacaggattatgagattaaagaaattatgaaagtattgattttgggaactgataaatgtccatattaaaatgaaatcttcacaatttatgtttagagattccagtaaagacaggtgtaagaaattataaaagtattaattttgggaactgataaatgtccatattaaaatgcaatgcctagggccaacaaaggagtcatattaatatgaaaaataatagctgaatattttggaaatgacacatgcagtaacaaatgtctatatgaaattaagaagatattgacacaaaattgagaaaaaattaacataattatgctcactactggtttataaaatgcctataataacactttttaaatcatattatagaaaataaaataactatataaatagcactctctttgcttgattttagtatttggtgcttcaaatgttttttatacaaataaacattggtcattttttgatggtaatttcaatattttcttccagaatacatgttcataaatgtaattgaaattgtataattttcagaaacttattttatcagttgtgacttgtatttttatgatagactttttacatttatatacttttgattcagaataattatagataaaaaaattataaagttaatacagtgtgttcccatctccaagtatctcctaagatgaatatcctctatcatcataagacatggtgttaacacatttacattgataagtgtaaatatattcaataccagaccttattttatttatcatttttccaataatttctattgtaaatgaaaaataaaattctaagcttcctcaagcaactaaatgaactcaaccctcagccaagggaatttcaaagtaaattctaaaacttgttccagcaatgatgggaaagtgagaggtcagacatgcctcattacatgctcctctctttggaattaaggcaccagtggccagcattagtactacaacaaagatcttaagacgggcaaaactatatttttgctgtaaacactttctatagcaaaaagacatcaaattacaacttgattctagtatagcatcacatgacaaatagcaaaacctaatgatttattctgtatgaaatctgctacctggaggcttcatctacataataagaactatgatctccaggaccccttatcttaatccagacactcagttgtaatgattgtattaccttacatttcaaccaattgccaatcagaaaatctttgaattctcctatgtcctggaaccctgtgcataaactttcctgcctttctagactgcataaatggtatagctcacatgtgttgattaatatctgcctgtaacttctgacccactaaagtatataaaatcaagctgtaatcaagccattttggacatgtgttctcaggaattcctggggtcgtgtcatgggccttggtaactcatatatatctcagaatgagccattttaaatatttcatagtttgtcccttttagtggatatcttcttttcttttttttgggacagaatctctctttgctgttgctttcgtatatttgtttgtttccagattccatcaaggccatcagtttgaattcagttgtcttgttcctttattctcttctggtaaatgacagtttgtatttctgaagttttctagttgaatattttatagataaaaatttatcaagtaggttgatagtgccatttgggactcttatatctttacctatttaatcattgcttgttttctcaatcacaatgagtgttgatttctccatgttctatacatgttagtctattttctgttccaaatccatttattaggtcttttaaaatggattttggaaaagttgatcctattattttatgcaatatttcacttgagttgcaaaggtattctttttatgattattttgtctgaaattaacatagctattcaagttttctttggtttatattttcatggtctatatttttccatcttatttcttctctttgtgaatatgttaagaagttttcttggagaaagataattgctgggtcttttttttttttagtcaactatgaggaattattttttaatgatattacccttttgtccaataatggttgttttgtctttttacaataatatgtattgtttctattaatttattatttaattattattgatgaatatcttattggttaccataaggataacaataagacatttctataattgaattctaattcaaaaatgtagtacttctttctctttcttatttctttgagacggagtctcactctgtcgcccaggctggagtgcagtgggacaatctcagatcactgtaagctctgcctcctgggttctcgccattctcctgcctcagcctcccaagtagctgggactacaggcacctgccaccatgcccggataattttttgtatctttagtagagacaggctttcaccgtgttagccaggatggtctctatcttctgacttgtgatctgcctgacctggcctcccaaagtactgggattacaggcatgagccaccgtgcccagcctacccctttatatatagaacagagatattataactatatatgtctaattcctcttttctatcccttttttattttatcagtttgtaattacataagctataaaaatgtaatattgacatttttataattgctttacacatttatgtaataaagaaaacacaaatgcaaaaactaaatttaaacctcatttttttcattgttgacaatctttatcttttggatacattcaggtattggatgtatatcatatggctgctcatctagaaactctgctaaaacgtctatggcaagattaatatgctgggaatagattttctcaggatttgtttgtccgacagagtatttatttgtctttgatttatcatctcaagagacaatgtcaagaagatgctgtttctgcaaatgggcaatctgcaaaccaaggacacgtcactacattactgtgcaagagaagcacatgaggaaaggccggtgtgagacacaaacctccaggaacacctgggctaatgagctgcagggggcgctcaggacccactgatcagtcaaccacagaggggagtgcaaaggttaggactgctttcctgcaagcattgaaaaaagaagaaaaaaactccgtctgacagtttctccaaggaacttctgtaattttagaattctgtgcctaccaatgacatctccaaatatttttttaaaatattgtgtttggaggacatactctcacatggacaaaacacaaattgacacagagatgaaaagccctcaaccatagtcaccaaaattggagacatgtagaagctcactgggacctgttgagtcttctccaatcacactcagaacagagaccttagtgggtctcccttagagtagtcattaaggatggtgataacagcctaaagatggtagaccatggtcagtgtcatatagaatatggggaccctcacaagttttttgtctgacccttctcctgacactaaattatgcaaattaataacactgatctggtgcttcttttgattctaatttattttatttttagttgtcgttctcacttttcctttggattttcctgctccctggaaaaggtaaatgtggtctccgtgacctcaattcaagggctgaagccctttccctgtagctcagctggggctcaggctgtggctactgcagccatgtggaagaggctgaagggactttcttcactctccttgctcaggaccatccactgtattgtgtataggcttctctggaaatgcaagtggccatttgtagtgaaagaaatatgtttgtctggttaaaatgggaggtggatgtagagttaattggctgctacataaactgtccttctccaccagtgcttttaggatgagattgtgaaatttgtaagaatcaaaatggagtcacatatgttaaaaccctgacaaatggattcaggaagtgtagggagaattcttacacacatatccctgacaacaagaactatcataaaatagttcttgcaaaaagaccaacatgacctcataatcatgacttctgcaaagacttctactcagaatctacttgcccagccttagattaatgccatctgaattacactgatcatgttactatcactggtcctcaccacagatgcaacaccctcctgagtcctgaaacctgactccatcccatagagtagggcacagatgaggggaatgcaaatctccaccagctccaccctcctctgggttgaaaaagccgagcacaggtcccagctcagtgactcctgtgccccaccatggacacactttgctccacgctcctgctgctgaccatcccttcatgtgagtgctgtggtcagggactccttcacgggtgaaacatcagttttcttgtttgtgggcttcatcttcttatgctttctccacaggggtcttgtcccagatcaccttgaaggagtctggtcctacgctggtgaaacccacacagaccctcacgctgacctgcaccttctctgggttctcactcagcactagtggagtgggtgtgggctggatccgtcagcccccaggaaaggccctggagtggcttgcactcatttattggaatgatgataagcgctacagcccatctctgaagagcaggctcaccatcaccaaggacacctccaaaaaccaggtggtccttacaatgaccaacatggaccctgtggacacagccacatattactgtgcacacagaccacaaagacacagcccagggcacctcctgtacaaaaacccaggctgcttctcattggtgctccctccccacctctgcagaacaggaaagtgcagctgagatacgttttcctgccagggcctgcatttcccatccccattagactcagagccctgtcttcctccttcttctttaataataaatggcatgactcctgttaatagttcatagaagcagaagctgagtcctgtttgtcaaacattcagcatgaaatgttcatgttacctgggccagatgcatcactggtatgtggccgccagtttaatgggctcatactactccaagcggccgaatacaaaacagcagaacatatgcctttattaaactgcaggaaatgacactggagaaaaatgtggggataagggagcaggaggaattgtgaaaattcagataatagcttttctcgtagagagaaaggtgcgttaataaaataattttataaaacaataaaacagatggaatgtgtccccatcacggagtgtctcacagtaacagtgcagaaataaatttctaaaaatgtcgtagggtaggtgtgatagacaaggcttatttccacacagggagcccataaatacccatgtaattaaaaatccagctcttagaaagggagtgcctcaacttgacatcagaaacccacgtcagtgagtctgaggagcaatgtggaaaagaaatggaaaattcaacaatacctttcttatgaaaatcctagctcacgtttcaacatgaaacataactgtctacaattttaggaaaaccatcccatggcaacaagtcactacactcaaaaggtactgagctaacagagttccagcagtgagcaggtcagtgctgaaatccccggagaatcaaggctctcaggtacgttgtacaaaacccagaactgagccacacaatctatggtcaagtgatctttgacaaagtcaacaaaaatatgcacggggaagaggccacgctcttcatgccatgttgctgggacaattggactgccatatgcagaagaatgaaactggacaccaacctgtcgacatatacataaccataagaaaatggactgaaggcttgattataggacttcaaaatataaatgtactcgaagaaaacaccaggagaactcctctggacattgggcttagtaaataatttaccacaaaaacctcaaaagcacaagcaataacatcaaaaatagatgaatggaatttagttaaactaaagagcttccacacagcaacagagtgaacagacaaattgcagaatgctaaaaaatatttgcacacattgcatctggcaggggactgataggcagaatttacacggaactgaaacaaccccaccacaacaacagctatgaaaaaacaaataacctcattaaaaattggcaaaggacacgagtaggaatttttttaaagaacacatataactggacaagtgctaaacatcactgattatcagggatatgcaaattaaaactgcaaagaggtatcttacaccagtcagaatggctactataaaagaagcaaaaatagcagacatcggtggcgatcaaaggcaaagggaagtctcagtcattgttggtgaggatgtagatgagcacagcctctatggaaaacaatgtggagatttttcaaagaaataaaagcagaactacctttgattcaatgaccccaccattgggtaactacccaaaggaaaaataaatcatcatatcagaatgataaccaaacttttgttttcctgcagaactattcacagtagcatagatatcaacctaaggaattaacctgtgtcttacaacagataattttatttaaaaagtcacatatatatacaattaaatactatccagccatattaaggaatggaatcatgtattttgcagctacatggatggaactctgggtcattattttaagtctaataaacgagaagtagaacagcacacaccacactttttcacttataaatgggagctaagtaatatgtgcacaggcccatagagaaaggaatgatggacattgcagactcagaaacatgggagagcagaagttgggagaatggtgagaaattacttaaagggtatgatgtacattatttggatcatggatacattaaagccaagacgactatgcaatatatatatgtaacaaaattgcagtcactccccgtaaatgtatacgaataaaataaaaaaaaatacaattgaaatgtgaaattattaacagttgatcaacaatcctgaaaattaaaacgtgtgatgcaataaatgaaaataattttagttgaacttcatcaaattttaaaacattttctattcaaccgactatcaagaaactgaaggacaagcttcaggggagaaagtatttgcaaatcatacatctaacaatgtaattataataagaaccctcaaaactcaacagtaaaaagaagcaatctgtttataaaataggcaaaggtttgtgcaaactttctatcaaagaagatgtacagatgacacatcagcatatgaatgtaattttccagtagagaaattcaaatcaagaccaaaaggagacacgactttaggctttagaatgaggaaaaataaagaagaaatactgacagtaccagtgtcagtgagcatgccaggccccgagagactaaaatattgctagtgcaaaatgaaagagtttctgggagaactgtttacagtttcttataaaattaaacatgtccttaatccatgacctagaactctcatccctgagtatgtcctacaaaggattaaaatcatgtgttcacacacacacgtattcagatgtttaacattgtgtgtgtgtgtgtgtggtgtgtgtgtgtgtgtgttagaaactaaaaacaacatgaacatctttgaaaatttgacacaaaccattacaggtgaactccagactttcttctgagtgacagaaggcctgcctgaaagatccccagagacacagtcatggatttcactgtcaccctcacatgtcactggcttgggctgggctctctctggctcttccctgaccaggaccagatgttgagctccactacctgcagttggaagtttatattttcaacaatgcactgagggctaagttgctctacagactgaaccaaacaaacatgggcgcctttgaacaaacagtgcctgacatttgtactgaccccaggagaactcttcccgctctctttcttcttggttctctcctgcaggccagcagccctgcagtttagcctggacctctcatgcatctacccatctcctcccaagtgcattttaccacagcctccactgtttttgtaattctccacactctgttgtaaatgaagtcaggtccttcgagaccagattcgggactctattttatgaccaaatttcagcctcacccccactcctgagacagagctcctaaataagattctgcaggtggagattaagagcgtttttcttcctcaatgtaggagatgagtgctcagtggagggatggggaggagctttccactttaccagcatgcagatcctgctggggtggaccctctgccataggagcagggctgggaaccaggcagccaatgtcctcctccttggtgctgcactcagggcagagcctgcatccatgagtggggctgtgtggaagaagtgagtctctggttctcagtaagtcttgtctagaactgagcctcagcagcatgacctgtgggcaaggtcggagggccaatgtcctggcccctggggaagagtgtgctctgctgggagctgggcagaaggaatcctgtctacttggctgcagccatctgtggtggaatttacatcatgctgagctcgggcatagaaggaaggaagagaatctttgatcaaatatcaatatcatgtctgaccttactgaggttttgtagattatctcgaataaatgttccttcactttctgtatgttgacagggcctttccagacccgttaatttttcaaaattaatctcaccagtttcatggaggcatggatatatcgagctccttataccgtcatgtgagatgtggaactgtttccttcactggttataaaataatgggttgacttttttcccaacactttacagataccatcaattgtcctattgcttatatggttataaccaaagcaatgctgatattattcatttctattctattgcaaggtatgccccctctactcgtctccaattgctggcatgtatttccatttgtctgtatgttttagtaatttgaatatgattcacctaagagtgtttgtgtgtgtgtgggtatgtgtgtgtcgtgtgtgtgtgtgttaagggcttatcctgctatttggtgttctctgacctgcactgatccatgacttacaatttctctaatttggaggaaaaaatagagggaaagtgagtttgagtccagacacaaacctcactgaagtgagcacaggattctaaccccaggggtgctcaggacacgctgatcacaagagccagcctcaggggcaggtgcagatggaggctgagctcttctttcccgtcagcactgtggcttcttctccataaaacatcttcccttgaggaatttatctgaattcatgattttttgcttatctccaaagtctctgaaatgaaaatgtttgttttaataaaagaaaaatcttctcacatgtgtaaaagacagtttcctacagtcgcttaatcttgtctttaaatgtcaattatcaatgcttctgaagtaaatcagctaaatctataaaagacactttgtttaactcaacactgcagcccagcatgacagcactgaaagggccagcaagcagcaggcaggatacggtgcatgccagacactggggcggaaggagttagtatccagtgcaagagaagaaagtgcccgtggtggtcactgtcaggacccaagctcacagctccaattgcaggtgaccccatgcaaaggaagagataccctcaccaatgtttagtgtggatgtcgagtctgatggtgccacattcacacaccacgtgaatatggaaagatttaccaactccattattgaggcgtctgctgagggctgcacaggcctctcaataaagtccaaactggctcaatagagcaggaaagaagctgcctcagggtttttatgatggtttggtgttgaaggaatggtggggcttcctactaaggggaaggagcttgtataatttgaacctaatactggcatccagtgaggacacttccatgattttctactaaatttcccatgtgtgggggacaaaagtgaaggaaaaggattaatcctgtcatcagtaatgaggcatcaaaatagagtctgatgacttattctacttagcaacttaagcaaatgagtgaaaaatgaggtaagtgttcactctgggtggacagcaaataggtctgcagaaaatagagtttttttaagtgtaagcacataacaaaaagaaagagaagaacaaattgaacagggatcttggaccaatgtcctgggtggaagctcttcactctgtgagatcatcagcttgctctgagggtctcgggtcaagtccttcttcaatatatctcaggccttacaggatacatgggaatgctcagcttggtgtccttcactagggaaaagaaagagaaatcagactgtcactgtgtctatatagaaagggaagacataagagactccattttgaaaaagacctgtactttaaacaattgctttgctgagatgttgttaatttgtagctttgccccagccattttgacccagccactttgagccaacctggagctcacaaaaacatgtgttgtataaaatcaaggtttaagggatctagggctgtgcaggacgtgccttgttaacaaaatgtttacaagcagtatacttgataaaggtcatccgcattgtctactctcaataaaccaggggcacagtgcactgtggaaagccgcagggacctctgcccttgaaggcggggtattgtccaaggtttctccccatgtgatagtctgagatatggcctcgtgggatgagaaagacctgaccgtcccccagcctgactcccgtaaagggtctgtgctgaggagggttagtaaaagaggaaagcctcttgcagttgagatagaggaaggccactgtctcctgcctgcccctgggaactgaatgtcttggtataaaacccgattgtacatttgttcaattttgagataggagaaaaaccaccttatggtgggaggcgagacatatttgcagtaatgctgccttgttattctttatgccgctgagatgtttgggcggagagaaacataaatctggcctacgtgcatgtccaggcatagtaccttcccttgaacttaattacgacatagattcttttgctcacatgttttttgctgaccttctccttattatcaccctggtctcctactacattcctttttgctgaaataatgaaaataataatcaataaaaactgagggaactcagagaccagtgctggtgcaggtccttggtatgctgagtgccggttccctgggcccactgttgtttctctatactttgtttctgtgtcttatttcttttctcagtctctcatcccacctgacgaggaatacccacaggtgtggaggggcaggtctccccttcgtacttgagcagccttacaactgggtgggtttatgaattaattcctcggttgcattacatgaaaaatcacacaatctacaaattttaaaaaataagcctttactttttataaaagattacagccatttcacaggctgggaagcacagccattggtgaagacgagagacaggcactcccaaggaggagcggtggggcagaaactttatgctgaacgtgttggctaaacagacataatcaacggattacaggaggggctatgcgtgttcataaaggtggtcatgacacatgaatatgggagcaaacatacacgtcacatgtgacccacttagcagtggggacttagcatttaaatgtgttacagttaggccctaagtgccaaaagctggagcaggggcacaaagaccctcagagcgcagcctccataaatggccagaaccaggccatggtcagtggtctctgatcaggagaaaattcctgaaatcaatctggtgtcccatccaagctggggttatggctgtggaatggggggtcagttagtcaggggatgagctgcagttggttaaatcgtgcttatctcaggatcagtgcttattttgctgctacagaagaaaataacagtttattctttaagagttggggtgagggatgtaacccctgcctggcatggccttaggtcttgtttataacggggcatcttattgccccggagaatctgttctgtcagtcttatgatctccattttaatgttagtgttggtccatgttgtctctgaaccacaaaagggagtgggtataatgaggtgtgtctgatctcttgttctgcccagctgggaactcagtttttaggtgtttttggtgcctccttggccaagagggggaaccactcaatctcatggggtgactgaaattttacttttagtttaaagtttataaatatggacctaagtattgacattctaaaagtcactcctttgttttggctaaaagtacttggcaagagtccttgaaatgaggttcaagagcagtattttctcatgactttatttgcaatagacacatgagagactgttgaaaagatgaagtaccaaagtagccttaatctgttggtgaatggagttggtataatacagaaatcactttcaatattttgtaacacatgcatgcatgcaataagacagcggtgagcactgagtgtaaagtctctaaaggtacgatctttcagccaccaaataatagtgtaataacggacatactctggaggagctgactataataccgtaacaccacggggagaaactttggccaaggaagtccaagattttcttttccttttcctttttttttttttttttttttttttttgttgttgttgtttgagacagagtctcactctgttgcccaggctagagtgcggtggtgcgatctcgactcactgtgacctctgtctccctgattcaagcgattcctgcctcggcctcccaaaagctgatattacaggcatgtgccaccacacccagctaagtttttcatatttttagtagagacggggttttgccatgctggccaggatgatctcgcactcctgacctcaagtggtcctcctgccttggcctcccgaagtgctggtattacagcgtgagccaccacacccagccgagattttcttaaagttttgaaaattttaatttaagggttacaattttttcaacatttccagaaagctgtagacagtattattctgtgttatatgagtgattgtagttccttccatttttagatagtattacaaacaattttagggctgcttgctttaaatagatagatgatagatggctacatacatacatacatacgtacctcgatagagatatagttgcaaacataaatacatagatagatagagttacagatgtattttagttattatgctacttttttctttgccttttcttcctatgttatgttagtcaggtctccaggacttaggagtgcatttacaatcccttcccttgtccattttgacgtgttctagacaatgcgagaatcctttgtgtgtggatcacttccaagtcatgcactacccttgcaataaatgtgtttgtgtatgtctttgccttactgacaagctctgctgagtgcagttatttctgccgtctgagctaactttacacttggtagagaaatatattctagatggaggcttccactattaatttaaattactaattcataacctccagcttaattattgaggtataatctatcagagatggtattagaacaaaggtttccaatgaaatctaacagaagggatgtcaaaaaattttcctaacttaggtaaaataaccctgagcccattcttagtatccagccatgtctcctatctatcacactgaatcccacactaactttgacctgacttgggacttgtaagcttcaaatatgaccttttgattgcaatgcctctaattcaggacgtgtggttattttagccaagagtaaagaaaaccaaatttaactcgctaaaaatgacaaagattaaaacctaatgaaatggaaactgggatatgagtggctccagacttggctattttaagagtctatgtgcccaggtgatttcttttctccattttacacacaggcaaacccaaaacgtcagcttcatctcccgttgactctcatcatctcgttcttcatcagcttgcttagaatgttgacttccagctgcatccatgttgccacaaaagacatgattttattctttttctgtgaatgcatagtgttccattgtatacatgtaccatattttcttgatcaaattcaccatgaatggacacataggttggatttatgtcttaggtattaagagtagcatagcaatgaacatgtaagtgggtgtattttttggtagactgatttattttcttttgtgcatatacccacatatgagatggccgggccaagtggcagctctgcttcaaatacttttcaaatctccagactgctttccacagtgcttggactaattcacattccacccaacactgtacaagtgtttcctgttctccgcagcctctctccagactgctttccaagattcctctcctccactttgacactttggtatatccatgtgtgtcctctctggttcagccagggacagagaaccaggaagacatcatgcattttctagagggagctggcttggggaatcaacgaccggagtagaaagtgcctttgtccatgcatcacaggcctgagggccctgggcaggaggtcaggaagagaggatgaccagacagctggggaaaccgggatgaataaagccagtttccttcctggtgaggaggggcaggtcgaagcctcgtgtccctgtagggatgaagcacactcacctgccactgctacctgccaatcaggtgacctgcagagcagcagctcctgagtcactgatggtgacttcctcctcctccaaaccctctaggatctgtgcttctcagagtgggaaccccagcaggtccccaagttttcaatggattcacctagctagtgtctctcctcagccccatccccaggctcctgccctggtgctgtgtacagtgtcacaacaggggtgacagtaacagctggtgcctgcactttccaggccaagaagtttgaaagaagcaagtcacagggccagccgggatatggggtaatcacacaaatttccttcttggaggaagtgctgggaaacatccttgagtcctcctcagctcacgtgcagctgctgctgttcatcccagtgcgggggacacatgagccctccccatgcccaggatggagctgtttcaatcacagcaggatgggaatgtgtcttctctatgggggcttttgaagcacagctctcctgttcctgagatttgagatttataaagacaagtcccacagagtggacctgcacaaataagacagtacaggatccccaggagagacatcccataagagaagggacaggcgggtcccatcacagacactcatcctcagaaaccctgaccggctactcaccttcacaggtccccagttcctgatcagtgcctgtgtctgctcctgagaagagatgaaaactcaagacaaatacttctcatgatcataggcttaaaaattctcaacgtaggaaatcaaatccagtagtttatcaaaaagttaacacactgcaatcaagtaggctacattctgcaaaagcaaggctgctttaactgctttccacagtgcttggactaattcacattccatccagcactgtacaagtgctttaacctatgcaaagcaataaatgtgatgctctactaaacagaatcaaaagcaaaaaccatgtgagtattccagcagatgcaggaaaaaagctttcaatagaatctaacaacgcttcatgataaaaaccctcaaaattatagacattgaaggagcacacctcaatctgatgagccgtctatgacaaacccatggccaacatcatactgaatgggcaaacactggaagcattttccttaagaacagaaacaagaaaaggatgcccgctctcaccacttctattcagcctagtactggaagtattcaccagatcaggcaagagaaagaaataaaaggcatccaaataaaagaaaaagaagaatgcaaaccctctgttttcactgataatatgattctatatgtagaaaatattgaaggctctgccaaaagtctcctagtattgatacattcgtttaggaatgtttcaggatataaaatcaatgtacgaaaatcacagtaacatttctagtcaccaacaacgttctggctgagagtggaatcaagaacatgctctcccaatagccaccaagacagtggaatacctaggaatagagttaagccaatgagatgaaatatctctaccagaaaaacagcaaaacacatgtgaaaaaaatcagagataaaacaaataaatggaaaaataaacattccatgcttatgaatttaaacaataaatatatgaaaaagttttaaaatttgtgattaattctacgtagcaatgccatttttttcaacatttacagaatattgttgctggtaatagcagtttagcatttgagtaatggaaacaccttacagaatcactttataacagttgcttcctgtagtgggttgcttcagttacctgatgaaaacatctgcatgtcacaggttgaaaacataaaatatgtctatcaactgagaaggttgtaggcttttgtcaaggaattacttcaagtcattcagaaaaacagcagacagtaaacgaaacttgttcaaattccatggagagtcaaagctgaagaaaatccaactagaagtgtccaaaggcccccaaggctcagttcctcggcaagtcccaccttctcaggttttccagaattttgtttttaactgatttacactgagtgaagtagattaccaggagttttccattattttaacataaaatcgggggctaagtgttgttattttataaagacatctttgaatctctcaggaaatttacctcctgagggttcagataagatcctactctaggttaagattacatgtttggcgcaatgaactggtacaaatcttactttagctttcatgttatctatttttccgcactgacttccacctttttattagtcaagtatatgggatggaagagtgcttctaagaggtccttaacttgcccatttcaatggattttcaagaagacatgagaaaccactttgtttgcaaagcatcccaaagccatgtcctgctccagaaacgtgatctcatttcctggtcgtttcttaactgacacgctctaatcagtgcatctgggccaatttgaaatgaggtgaagaaatgtgtcctaaagtaaagctaacattgtaataggaattcgtgtttaaaaacatttagttttattattgggcaggatccatcaacatataacagttgaagtttctcaacaggagtttaataaatataaggaatgtacagaagtgtttcctaatttaaataaaatgtagtgattacctaggctgtgagtgcaatcttggtaatcttctatgtccatgcccatcactctgtgcaccgcaaactaattttgacctcagcagaaacgggattaattttcaaattagtaatttttttccaatttaatttatttagatgattatgaatgactattttagcagaaagagaatcaaggaaacttgaactaaataaccagaatttaaaatgacaaacaattcaacaagatgccaggatgtgagtggctccaggcccaattaattcaaaactttatgtgcccaggttctgtattttcccaaaattacacatctccattccagcttcatgccacagttgactcccaccgtgtaagacatggcgacaccattcccaaaggtcgtgtgcaattctgaaaatggaataagcaaggagaggagatgatagtttatattctcctctgaggaggaagaattgcctcaacagaccacttctcctgcatctgtgactagaactatgtcacaggcacacatggagcaaaatccctcaaggggataatacggtaacattaatcagggtgatcatttttaatactataaaattcatagatgacactgcattccagcctgagggacagagcaagaccctgtctctaagaaaaaaagaacaaatcaatagatactgataccaacattttagataatgaaattttcataatgtaattttaaatacactcacatcattacataaatcttcccagaaatattcctagtcatgttgagtttcatcaacttttccagtgttcaaatctagaaatccaatagactcttgaggataaatcaaaatgagggcagtgaaactggtatctgctcagcacctgttaactcaggaggactcaatacacccttgcacactgctgcttctctgaatggctcacaaggactccagctcactctccatcctcctcaaacatctggcccccacttgccctaagttgactctctgctcttagtctgtgctctgaagtcttcccagaggtgaaagtgagctgtcagatggaacttccctctcacctcagcgtggaatttactgctacatttaactatcactctttccataatggttgatttcttggtctgttcattacagatcaaaggcatctgatttgaatctttatttctttgcatttgtctccatgacaattttgggaggttttaccgccagcactatgacacgatgtagtaacatgacacatttgtggttaacaacacctacaaattcagaagctcttcggttgtcttcccagcaaatatagctgcttcttttctgtgtatgaacacatcctggaaacacgtacacacccacatagatatatacatgcctatgacattttcttctctgtaagtgaaaattaacctcaatttcatacgaagttcatcatttccctgaaggtgaaggtaggtcgtttttcatctgttctaacaaatgctcagacaccagctagtaagtgaggagctaccctgcttctggatgttggatctgtctcttcccctttgctttaccacagaagattggccacttgtccaggtcccaagaagagagtccaggtttgtcctgataatatgactcatccaacttctgataactctactgttacacacattcatggaggtagcctattaattacataattcactaaacaaataccaaatacccacattgcaataccccatacccaagggtatgttcatgcattcagtgaaggaaaaggcttttcagagacagatagatcaggctagattggtcaatatatgggtgaaaacactggacttgaatgtatctgttttcccccatgtcacatgtgagacctgtcagacaggaccagggttccttgtgcactcagaggtgagggctcacagaattcctctctggtttccaggaaaggtaactgcagtaatcttggtaatgagaatatcctccagtgctgacctattatagagtttacatatgaaattttcactgcaattcacaatctactctttcacacagaagtgtacagaggtcaggacacatcctcagggtcacacattgagaatgatgaagatatgtcccacgagtttttcctaaggtctcagaaagaattccaggactcaaaaggtctcagagggcagctcccagtgccttagttaaaatggtggctcaggcctgtaatcccagcattttgggaggccaaggcaggtggatcacctgaggtcgggacattgagactagcttggccaacatggtgaaaccttatctctactaaaaatataaaaattagacggggggggttgtgcatgcctgtactcccagctactcgggaggctgaggcaggagaatcacttgaacccaggaggcggaggttgcggtgagccgagatcaggacactgcactctagcctgggcaaaggagcaaaagttcatctaaaaaatttattttaatttaaaaatttttaaaaaatggcccactccctagaacagagagattccctctaaacatgatggaggtcccgaactatacattaagtgaatcctggtgtgtctgaactcacatgattattacgttaagctgctgttccaatctacttcctcacctgggaaaagaggagccagggcatggctagttgaggccccaggaagagaactgagttctcaaagggcaaagcaagcatcctcatcccagggtgagcctaaaagactggggcctccctcatcccttttcacctctttatacaaaggcaccacctacatgcaaatcctcactcaggcacccacaggaaaccaccacacatttccttaaattcagggtccagctcacatgggaaatactttctgagactcatggacctcctgcacaagaacatgaaacacctgtggttcttcctcctgctggtggcagctcccagatgtgagtgtctcaaggctgcagacatggggatatgggaggtgcctctgatcccagggctcactgtgggtctctctgttcacaggggtcctgtcccaggtgcagctgcaggagtcgggcccaggactggtgaagccttcggagaccctgtccctcacctgcactgtctctggtggctccatcagtagttactactggagctggatccggcagcccgccgggaagggactggagtggattgggcgtatctataccagtgggagcaccaactacaacccctccctcaagagtcgagtcaccatgtcagtagacacgtccaagaaccagttctccctgaagctgagctctgtgaccgccgcggacacggccgtgtattactgtgcgagagacacagtgaggggaggtgagtgtgagcccagacacaaacctccctgcagggaggcggaggggaccggcgcaggtgctgctcaagaccagcagggggcgcgcggggcccacagagcaagaggccgggtcaggagcaggtgcagggagggcggggcttcctcatcagctcagtgctctccctcctcgccaggacctcagctgtccccaggcctcctctttctttattatctgtggttctgcttcctcacatcctcgctgcaggcaagaaagaagggagaaatttctctgtttaccattaaggttttaacagtcactggcacctttttttcaacaaattcccacaaggcccattttaccttcttgacaaagtatttcaaggcttctcaccatctcttgattggcgtcatcggctgcatcgtgtcctgctcttaaattcatgtgatgaaaccccaatcccagtggctctgtatttggagagagggattttaagaaggcaaataagttaactgtggccataaatgtgggaccctaatccactaggactcttgtccttatgggaagtggaagacatcagaggcctctctctccacatgcacacagaggagaggccatgtggggacgcgctgcatgagaaggtggccctttgcaagcctggaagtggcctctcaaaaaactaaccctttcttcacccagatcttggacgtcaaggctccagaacaataagaaaattaatatttgttatttgaaacaacctagtctgtggtatcttctgatggaaagccaagcagattcacagatacaattgtgttagctccgtctcctggagggagaagcagcccaccgaggctgacacatctctcagattatttttataaagaaaaatagatccaagatgaaaaccccaccacatttctgctgagtcattcacttagcaggcttctctgagatcagccctggggggctgtgttctaggtcatgtctctcactttccactatgagaatccatgtagatcatgagaaccagccagatggagtcctgatcccggcccaccttctgctgctccccaagtatcccaaagaaaaccactccagcgtcacccctgtgtcttctactctctaaaatcccactaaagctgaccttaaaccaggagatatttggggccgggctcttgttctcttcttcttagtcttccataaggtccaggtgctgagtaaagcctcagtaaagattgagcttcagttcccctaacccacatcattcccttacatccttgtcatgcatctgtcctctgtgggcactcagggcaggttacacaggaattgcctgaagctggcctcaactgatgtgctgagaccacgggtcatgcacatgtatgattccgggtcatgcacatgtatgattccaggtcatgcaggctctactgcaggacagacctgtgtcctgtggggcacagacagctgctgaccccgggtctcctctaataactcacacacctggtgtttgtgtgtgtccagatggccccatgagcacagcacactagggtggccaaccttacaggtggggccgtcagatggaatggacaggctggtcactcccatcatcagtgatttcccagtgaattttaaataaattaaacaaaattaacaacaaaggggaaggatatgtacctgtctctgggaggtatacagggtcccagaactgtgctgggagtgggtgtgaaacgcccttttgtgtggaaagccctccagcatgagtgaaagctgaaggaatgatcactgtgcaggtggaggatgataggcagctggcagggtacatttcctgaagctgttcctgggtgcatgatggttggatggcccatggtgttgagggctggactcacataggaacaaggaaattatcccatgggaatggcagaaaagaaaatggagatggacacccctggagacagcttattagatttggtggaggaaaaatagaaatttattccaatgaccccagcattttcagctaaataagagttgcattaatagacagaattatgaaaggaagggagaaggagtttatggagggaaaaaaaaagaagataaattaaaatttaaaactatgcaaatctatcaattggcagataacagagtggagctgatgcagctacttccttgttctggaaacctgccagagacacttagcattcctgtaaggccagtctagtggtgatgaacttgtccactttttacttttttggggaacttctcaaacctcctgcattattgaagaaaagctttaatccatgtaacgtatttatttggaagtttcttggctttgtttttattttcagcaacttgaacagaatcatgcacatcatgatatttcggtgaacaacaggccacctacaggacaaaggtctcattagattataatactgtattttcaccgcatttttccatgcttagatatgttcatctgtataaacatctaccatggtgattcagctgcccacagtattcactacacttacatgacatacagatttgttacctaggagcactatgctatcccacgcagcctgggtgtagcaaggtatttcatgtaggtttgtgtaaacacactctatgatccttgcacaatgacaaattgcctaaggacacattgttcagatgtattcctactgtttttcatttttttttagatggagtctcactctgtcacccaggctggagtgcagtggcacaatcttggctcactgcaacctccgcctcccaggctcaagcgattctcctgcctcagccttccgagtagctgggattacaggcatgaaccaccacgcccagctaattctttttttctattttttagtagagatgggatttcaccatgttgccctggctggtcttgagctcgtgacctacatgatccacccactttgccctcccaaagtgctgggattacaagcgtgagccactgcgcctggccaatgtatccctactgttaagccacaaatcatcgtatctcatttctctcccttttttgtccctgttaatattttcatgttgtgcgtgcattcttctcctagctcagtgaacatatttataaggtttactttgaattttctgctaggtaatcaatgtatctccttttaatttgtgtcagtttctagtgctttttttgttaaataatttggaccacttttttctgttttgtgattattgttattattattattttttactttctctgttgctttctcctcattagaagaaaaagctaccgtaatcactcttcacagaatatgcccagggaaaatgccatcacctatcaacccaggctgtcattgtggcatctcttaaaacttcataatggttgaaattttttgttgttgttgttattagtggcactcagacctacagaggattttaagttttgctcctactctaaattaggtggcattgaaattcatcctgcaggcagtctctgataaagtggaggaattgggcagttttgttatgcatatggttcataaaaataatatgagtttaaggttttctcagccaagtgctatatcctgatattttataatcacttctttgaatctctcttgggtttatcttttgaaaatttagatcagaatataaaccaggtttgaggctttttgtttggtgtaaacatctcctataggtcattgcgtgaaaaggcacagagtctatctgaggaggagaactcagggaagcctcacaacaacaggggagacaaaaccgaggtcactaaaaaaatatgaagcttctggctcctgcagcctccagacatgccccacaccctctcattgcacagaaatgaattcctttctctttcctgagtgatctttgccaagattcctctcctccactttgacactttggtatatccatgtgtgtccattctggttcagccagggacacagaaccaggaagacatcgtggcttttctagagggagctggcttggggaatcaatggttggagtagaaagtgtctttgtccatgtgtcacagccctgagggacacgggaagaaggtcaggaagacaggatgaccagacggctggagcaaccagtatgaacaaagccactttctttcctggtgaagaggggcatttggaagcctggtgtccctgtaggggatgaaccacactcacctgcccactgttacttgccaacgaggtgacccgcagagcagcagatcctgagtcaccgacagtggctgcttcctcctccaaaccctccaagatctgtccttccaggagtgtgaacctcagcagatccgcacgttttcaatgggtccacttagctagtgtctgtcctcagccccatccctgggatcctgtcctggtgctgtgtacactgtcacaatagtggtgacagtgacagctggtgcctgcactttccaggccaagaagtttgaaagaagcaagtcacagggccagcctggatttggggcaaacacacaaatttcactctgtggggaagtgctgggaagcagccttgagtcctcctcagctcacgtgtggctgctgctgctcatcccaggtgggacacatgagccctccccatgcccaggatggagctgtttcagtcacagcaggatgggaatgtgtcttctctatgggggcttttgaagcacagctctcctgttcctgagatttgagatttataaagacaagtcccacagagtgaacctgcacaaataagacagtgcaggatccccaggagagacatcccatatgagaagggacaggcaggtcccatcactgacgctggtcctcagaaaccctgaccagctactgaccttcccaggtcccctgttcctggaacagttcgtgtgtctgctcctgaaaagatgcccatcaagagtccccagggttctgcccccttccttgatgtgcctctgggagtggggctggctgggctgtgggtctggcgtgaccctctccacaggtcagcggctcagtgcaggctgcaccgactcggtggggctgggctgtggctgaccctcccagggggagcctggactcttcttaggggtatctgcaggatcccaggttctgggagaacagggaagccacagtgtgtgcagggccccatctccagtaaagtgtttgctgtcgctctgttgacaagggcatatccccaggcctaggggcactgtgggcgcacgaccaatgcgcgagacacagggagtaaggcacagttccctcccattactgtgaggacactagacacagtgtgtgtgtgtgtgtgtgtgtgtgtgtgtgtgtgtgtgtgtgtgtgtccattactgtggggactctaaccaccgtgtgtgtgtgtgtgtgtgtgtgtgtgtgtgtgtgtgtattaggagttttgcagtggcctctgagacccatgatcttgcaggtttagaaattatctgatgagatgttcatccacaggaaccgacaagagattaggtgttctcccaaagcccctggaagctcctggactcactgtgagtgtggactgatccagtgcttccagagctccacagaaggggctccctggtggtttcatagaatccttgcttggggtgtttctgcagagttcactggctttcctacgaccaatttaccattgcaagcgatggcgtcagcagcacatggtgtcacgtgtcactaaaggagcattctgagccaggacacagccacttcatactggggggaaaatgctctgggagcccagacaggagcctctctgcagtgcaagggctgggctgcagggggcgctcaaggcccacccagcacaggctccagccccagagcaggtgcacaggaggctgcggatggagtccccttaagatctgtgtcattcttctaaaaaaatctaaaataagtatttgacaaaaactgctgaagagtccataaatatcctattcaactgcaagaatttatcaatttacactggagatttctaaccctgctacatatcttaatagtaagcatctggaggtcaattaagcttttattttatataaataagtgcaacttttggagaaacacactcatcccccaaataacacattcatgtattaaagcctagaaatattttaaattacctctgagctattcaagtgtgggttcccagtgaagtcctgttctagggaaaattgttctccagtgggagaagctctgtcaacatacagtttagggatatggcagggcacacatggcctctaaggggattatagcttgaacccttagcatcctcctgttgggtaatccatgtgtcatctctccactctttctcatgctgtgttaggtatgaaatagcatcgctcatgaatatgcaaataactgagatgactatagatatctttgtgccctgagagcatcacccaacaaccacatccctcctcagaagcccccagagcacaactcctcaccatggactggacctggaggatcctctttttggtggcagcagccacaggtaaggggctgccaaatcccagtgaggaggaagggatcgaagccagtcaagggggcttccatccactcctgtgtcttctctacaggtgtccactcccaggttcagctggtgcagtctggggctgaggtgaagaagcctggggcctcagtgaaggtttcctgcaaggcttctggatacaccttcactagctatgctatgcattgggtgcgccaggcccccggacaaaggcttgagtggatgggatggagcaacgctggcaatggtaacacaaaatattcacaggagttccagggcagagtcaccattaccagggacacatccgcgagcacagcctacatggagctgagcagcctgagatctgaggacatggctgtgtattactgtgcgagagacacagtgtgaaaacccacatcctgagagtgtcagaaaccccaggggggaagcagctgtgctggcatggaggaaatgacaaagattattagattgaagactttctcagaaaatgatattaagtcattaaggaaaaggaacaatataaacgtgtatttgagaaattttaattatttgagagatttttcatacaatatttattctgcaagcaaatttcagggattgaattaataaaactgatacagaacttcctctgtaggtatctgtgtaaacatcaatttctgaatcagtgttgtaaatattttggaacacacacacaaatcacattttatctctacttttatctctatttttaaaaatgccaaaaaaactcattttgtgcatgtagcattttgaattcccaccatcaatgcatgatagttcttggttttccacattcatattgccatttatcattatgagaattgtgtgttttaaccattctaataggtgagtaatggtatctaatttttagttaaatgcacatttccctaataaaaattcacatttaacaattttcatataatttttgccaagatgcctcttctcatatttggttcatttttaactgcattgttttcttttgattagttgtaagtttacttgcatattgattataaaatcatttaacaaattaaaagaattcatttaacaaatatgtgacttggaagtattttctccaagtctgcggctgtcttttactcccttatcagtatgtattgcagaaaagtgtgtgtgtgtgtgtgtgtgtgtgtttatacaaatttagatttaaaaaatgtaaaatgttattcatccacagatcatgtctttggtattatatctgaaatctcattataaaatacagtaatagcaattactttttccacgtctctaatctcaggctacaatcaactcatgagtgtttaagcttcacctacttgattagaggactatcaacctaacatatttggaatacttctgtaaaaagatgtgttcctcttcctattatttctttatttgatcacttattaatatgtgtattggtttatggatgtctatttcatactctgaagaagatccatgctacattattcattttatttttcaaaccaccacggctttattatgtgctgggagctcattgagtttggatcctgcatccttacagctcacctcatgcttttgtttttgaacacttccctgtttcctgctattataataaattctaaactcattttctatattatctttttcatacatagaatcagccatttttctaaagattgcttgcttctgatgttaaagaatagtatttaaaaaattgtaatactgggtatgtgcattgttaatgtggtataagtacttgcaggacctctcaaccaactggcctagtaaactatgtatctaaccttctgtaatgtgattacattaaaaatgagaacacactggtctctctacccaattatgctaccacatggatctttctagccttccttccttgactgtctataacctctcactgcaaaatgaggaaccccatccaaccatatgccattttattacttagctgcacaatttcaggacacatgcatagcagtatcagaaatgtaaagctgtacccttgtaggaaacatgtttatctactagaatagagtgcttatgttcagtttctttacactttaaacttacagagtttcctcattttcaaagttccttaggtcagcaacttcattttccactttcttcagtgaggtcatttcaatgacactgtataatttgatttatttgaaattctataaaagccaaaactgtagtcaagtgaacaacaacatatagaggatattcgaggagtttagagactggtataaaataagttaaaaagacactgtttaagaagattaaaattatttttagtgatatgcaatggttcagatatgacacaattaatttgtctaagcacatagttttgtgatggaaaatataaacctaaatatatacaattaaaaaaaaatttagcagttcattaacccaaggatcaaatgcagattgtataaaattatctcattacttattttgtgagggtggagatttcatgagatgtatgcaacaaagaatgaggtaattttcctgatttgcatataagatgttgccattcactaaagacctttaattttttaaattgttttttttttaaatcaattttctatgtgacccaggtttttttctcttgacaagcaaataacccacaggattattttctttccttggttgagaaatatttccccaaacttcagctcagttcaggcatacactgtccctgaatgggcatttaccctcagatgggtacacacacctgtcaacatgtggactcttctgtcagacaaacgcacctttactcacgtggattcttctctcagacaaacacacatgtccccacgtggactctttcctcagactaccacatatgttcttacatttactctttcctcagaaaacagacatttcctcatgtggactcttgtctcagacaagcaaacatgtctccatgtgaactcttcactcacataagtacacatatgtccacattgactgtttccttacacaagtacatatatccaatgtcgaattgttctgtggcaaaatgatctcaagataatgataatcataaaccccctccctgacaaggcatagatctgtatttttttcattgcaacctaactttgccttattgtcaagaacagtagtttgcagctctaaatataccaattagagacaggtgtccattttctctggaaacgtatttttatgttcttactggacatatttgttgataatgtttgctattatgaagataccccaacagtgtccacattagagaataaaaaatagtaatgggcagattaactctgtgcatccagacccagaaatcctttgaccttgacttccctgaaatgtagacacagaggatggatgagcaatgctgagcagtgcacccatgaccacaaaaagaaagacgtggaaatgtgtcccctccacttctcatgaaaggcagctcatcccctgttccctcaggccctggcgaggagccaccccatgtctgtgcccttcctcagtgtccacaccgtggggtctgcattgatctggattctcttctcatccccgtcaatattagtgtccttcgtaaatcaggtccagctgtggcttctcctcacggggctgttctcagtctgtttgctgtgttcacggaagtcctgtgtgaagtttactgatggagtcagagggggaaaaaatttacagcccagtggtgagactctcctgcaaagcctctggtttcacctttactggttacagcatgagcttggtccagcacgcttcacaacagggataggtgtgggtgccaacagtgagtgatcaagtatgaattctcagggttactttccatgagtacaaataaattaacaatctcaagcaacacccttttaagtgcagtctgccttacaatgaccaatctgaaagccaaggacaaggtcatgtattactgtgagtgacacagtgagggaaaccctgtgtgagcccagacacaaagctcaccgcagggagacaggaggggactatgtggtagatgctgctcagaaccaccagggggcatcaggaccatcagggagggtgcacagaaccaccaggaggggctcaggacaccagggggcgctcagaaccaccagggggccctcaggacaccagagggtgctcagaaccaccaggaggcgctcaggacaccagggggcgctcagaacactaggaggtgctatgaatcactagggggcgctcaggacacaagggagcactcagaaccaccagggatagctcaggataccagggggcactcggaaccgccagggggcgctcaggacactagggggcgctcagaaccaccagggggcactcaggaccatcagggagggtgcacagaaccaccaggaggggctcaggacaccagggggcgctcaggaccacaagggggccctcaggacaccagggggcactcggaaccaccagggggcactcagaaccatcagggagggtgcacagaaccaccaggaggggctcaggaccaccaggaggtgctcaggacaccagggggcgctcagaacactaggaggtgctatgaatcactagggggcgctcaggacacaagggagcactcagaaccaccagggatagctcaggacaccagggggcactcggaaccgccagggggcgctcaggacactagggggcgctcagaaccaccaggaggcactcaggaccatcagggagggtgcacagaaccaccaggaggtgctcaggacaccagggggcgctcagaacactaggaggtgctatgaatcactagggggcgctcaggacacaagggagcactcagaaccaccagggatagctcaggataccagggggcactcggaaccgccagggggcgctcaggacactagggggcgctcagaaccaccagggggcactcaggaccatcagggagggtgcacagaaccaccaggaggggctcaggacaccagggggcgctcaggaccacaagggggccctcaggacaccagggggcactcggaaccaccagggggcactcagaaccatcagggagggtgcacagaaccaccaggaggggctcaggaccaccaggaggtgctcaggacaccagggggcgctcagaacactaggaggtgctatgaatcactagggggcgctcaggacacaagggagcactcagaaccaccagggatagctcaggacaccagggggcactcggaaccgccagggggcactcaggacactagggggcactcagaaccgccaaggggcgctcagaagaagcagggggtgctcagaacaccagagggtgctcagaagcaccagggggcgctcaggacaccaaagggcactcatgagactgtggcaagggggtgctgagaaccacaggatgtgaccaagacaccaaggggcactcagaactgccagggggtgctcaggacaccagaggattctcagaaccaccaggggatgctcaggaaactagcgggtgctcagaaccaccggaggacactcagaaaaccaggggatgctcaggaaccaccagggggcgcccacgacaccagagggcagtcagaaccaccggggcatgctcagaaccaccagggggcgctcaggacaccaggggatgctcaggacactaggggcgctcaggaaccaccaggggacgctcaggacactagtagggtctcagaaccaccaggggatgctcaggacactagggggcgctcaggaaccaccaggggtcacccaggacaccaggggtcgctcaggaaaccagagggtgcccaggaaaccaggggaggttcaggaaccaccagggggcactgaggacaccaaggggtgctcagaaccaccagggggcgctcaggaaccaccagggggcgctcaggacactagtaggcactgaggaaccaccagggggcgctcaggacactagtaggcactgaggaaccaccagggggggctcaggacactagtaggcactgaggaaccaccagggggcgctcaggacactagtaggcactgaggaaccaccagggggggctcaggacaccagaggtcgctcagaaaaccagggggtgctcagaaccaccagggggcactcaggaaccaccagtgggtgttcaggacagcaagaatggctcaggacaccagggagcactcaggacctccaaggggctctttggaggcagctccatatcaggtacctggggaggatgaggtttccttttccaccttggtgattcctgacctggtcaagcaaaagtcttccccaggatctcttacgatgtcttccttgtaactcatggtttctttcacctataaaacattaacttagaacaggggttcaattcaacttttaactctgcctattttcagagttatactagcaatgatatatctcagtatattttttttaattgtgtatattcaatccaaagtctggctctatgcacaatttttttgttttctgtgctgtcagacacactattgtaaatgcttttctaacaactcagcatatgcatggggtccagtttcttttcctttcatcggctgtttgtgcagatgaaacaccactttaagggctcctgtcctccactttggcccctggtgttctgcttctcaaactttctccatcttctctttttctgtcaaaatattttatcttcctcagtctccatgcaggaaacaggaagtccttttacttcctgtcctccatgtctggtaaatcagttcacttcttttcatgatcactgaagccaaccaagtttaggagagtaacagttctccttagaatacactctacctgcagaccctctgccctcatcacacttttctagggtcctgcagacataacccccacccattcctctttttccctaagtaccacagactaggctctgcaacttatgctaccctctgtgtgctcagcccaggggctcagtagtgctttcatgaagtccaaatccctaatgtgtttgcccactctcagaccaccctccagcaagctgccattgtgattgaatcctgcaaagcatgggctgctttcagtttcctattgctggatgttctttattataaaggcatattggcaaataacgactagagtttgtattgaaaattaacgccaaaaagttttttaaaaagtttttcaaatagaaaagttctatcctgcctagtttaaaaaaatacaatgttactttaatcaatgatttaataaaaatttaagtgatgtttgtcttattagttattcaatttattaataactgactgatatttaaaaagtaaatactggctgggcgcagtggctcacgcctgtaatctcagcactttgggagggtgaggtgggtggatcacctgaggtcgggaattcgagaccagcctgaccaacatggagaaaccccctctctactaaaaatacaaaattagctgggcgtggcggggaagctgaggcaggagaatcgcttgaacctgggaggcggaggttgcggtgagccgagaacacgccattgcactccagcctgggcgacaagaccaaaactctgtctcaaaaaaaaaaaaaagtaaataccattgtacacttaagtaatatatttggcaagaatggcatttacattcattcaaaaatgaaactgcaaatacgagttacattcaattaaataattaaaataatatagaaaaaaatgggtgtgttgttttggtgtttaatatacattcatttttgcatggacgggtatatgtgtcattgctgggctgttgtgtatgtgtgcgtgtgtgtgtgtgtctgtgtgtacaactatgaagtttaaaatatattattaaattacgtagttatattaatccaaatttatcatgttaaaatattaggaaaaaaacaccagtagagaaattacagagaacatcagcaatgcctacagcatttacaagagtcacattaataacaaacaaactagttcaaatgtttagatatgacacatgcagtagaaaacgttcacatggtattaacacaaaaatggtgcacaactgaggaaattataatacgttcatgatattggctacataaatgcttatgatagtaatgcttttcatccatcaaatgcttatgataatgcttttcatccatcatattatagatgataaaacaactctataaacacttccatcactagcgtttaatatgagatgcctcacatctttttctgaaataaataaacatctgtccaccacttcgatgatcatttcaggattatcctctgaaataattatccataataattttagtaacaatattattttcagaagcctattttataaggtctttgaactattatttttatgattgttactttatattttacacactttttatttggaataattataggttatcagaacaattgtaaggaaaatacagtgtgttcacatccatctccaagttttcactaaagttaatatgtcaaaaaaaacatgggacatgggactaatatatttacattgataagtttctgtttattcagctctgggatttatttgaattttgccaatttttaacagtttccttttttcctttttcttttctttttgagataaggtgtcactttcctattgctttttgtttgtttctttgttcaacccacgtaaccacatcaaattcagtcaccatgttcctctcatatcttctggttaatcacagtttgggttcctgctgtcttcccattgaatattctataaatgaaactagtcaaataagttgattctggtcacttatatatttacctattttatcacgtttgttttgtcaatcacagtaagtgtcgaattcgctatctgttatagatgttagcctattttctatcccagatccattggttaaatctttggtgatgccttttagaaaactgatccctttaccctatgtaatatgccccttgattcctgaaagtcttatgtctaccttgtctgaatttaacatagctaagcacgctttcttttcgttcatattttcatggtccatgttttcctgtatttaacttttctatgtagagcaaatttctgtacagagctagtagttgggtcttgctttttaaatcaactataataattctattttaaaactggtattactatttttctgttaatttctgttttaatttggcattttatgatcatgtttatttctctattaacttattgtttagttcatcttttatgaatattgtattggccctaagatatacaataagaattgtgtataatcagattctaattcaaataacgtaaaacctcttcataggttgtagagctattataacttattcttctaaacactctttctcatccgttgtcttagtttattctcagtttgcacttatatgtgctataaaatataatatgtgcatttttatcattacatagacatatattagaacaattaaaaatataaaaactacatttcaacttcattttttcattcttgaccacatgttttatttggatagattcatgtttcggatgtatatcatatggctactcaccctggcagaaaatttgccaaagcacctactgaaggatgaatgcactagcaataaattttctcagaatcgatttgtcttacagggtattcatttgactttcgctttaaatgaaatttttaatatatatagaattccagtttgactttaatttgtaatttattttcttgtactcatgtattcattattttcttcctgaagatggtcacacattccattctgctgggccttcattatagatatttgtgtgtatctattcagggctatatttgcaatttatggatgccacaattatcagagttgaagtcagcttctgctgtccacagagatttcaagttcctcccatgatacttgcttttgtgtccctgtttgatcctgggtctttatatttagttttccccagggaggctgtctgtttcagctgtggaaagtgcaccctactgacagtttaaattgatgactgtgtggtgaaggaggttggacaaagcgggacttcctccaaccttctgactgagtctccttcttatgcaggagtagtaagcatagttctggggagtggccttccacattgtcctgtccttaactctttccccagggctggaacgtcttttcccagacacaactgtttttcaccagtgtccccagctttttacccactatccttaccctaaagagtaaggatttctttcctgaggaaggagatgggaggtgtttctggatcaagtttccttggtgtcgtctgtttccttttgtttctgttgacttcaccacagctcatatgacacatgctttggtggatttcccctggaggtagtggaggtgcattcaggcattccacaggagctgctgttcttttccccagtcaacaccacaagacaccagatgaggaagttgtccgtggatttttcaagttctctaggaaaagcttgcaagcactaggccaatctaacaccattagtacatgcatactaaaaaaaaaaaagtcattaagtatttctaggttagtctgtttctatctcaaatgccatccagtggcacctgccctacgtacactagcaggtaggtcctggttctctctgcaggctcctatcttctcagatttcagttttcttgtttgcttggtgaaatcaactcagatatgttgaatgttttttctctcttttatttgtagctgttcagcttcgttgttaatgaggtcagaataaaatcacagttttctcatttttttcacattcccacactgaatagctgctttccgtataaaagccagaaactgagagaacacattgaatatccattacaggtgaatgttaaacaatttgagatatgtttgtgtactggaataaaatgctgcattacaatcaagtcatcactcattcacataaaacatggccacattctcaaataatgtagggacctgagtgcccctccatctactggcctctcctggggccctagcctggccacaccttcttgcagggcagtcttggacgccctgggatcccgcaccaaaatttctgccctggcagaacatgcctgactggtggagagctccaatcgggcagccctcatgtgcacacaccagcttacacacttcctccgaatactgtaggttcacccaggcccacgtaacttcccacatcactttgcagtcacatgtctgtataggtgggttttgcttttcttgtcccaccattgcgtggagtgcagtcccctccccccaccccaaccaccatggcagaggaagctttggtggggaaaaagccagggccgctcctgtcagcgtcccgcacttgcgctaattctgcacagagaatagcagatcatctcacacattcagaaatcactcctgcttgtggggcatgaatacggcacccgggcctgtgcccacaagtgtcccatccctgagccaacacctcctccagtgtgaccttgaacacagtcaccaacagggccccacagacgcaatgcctctgccactgtggcgaacacctgcagggaggcaggcacccagacacccactagcactctgccacagctgccacacctccaacagcccaggacagtggattcctaaccttaaggagccggagaaccaagtcagggactagtataacttcccccagagtcagagcacacagtctaggtgttgggagctgagcactggccacctaaatttttccagaaatgaagccagttggctgaatccaccttataccacaatcaaaccctcaaggtcatccaatagggtaaaagaaaataaaaatgtatccaaaggtcagcaacttcaaagattgaaggtggataagcccacaaagatgagaaagaaccagtgcaaaagtcctgaaaacaaaaagggcgccctctttcctccaaacaaccacagcacctcttcaacagcagttctgaatggggctgagatggctgaaatgacagaaacagaactcagaatatggagagtgaaaatgtagatgaatacagctatttatggagaatactataaatgttcctcaaaaaataaagaaacaaaatctactgtagaatccagcagtctcactgctggctatgtatccaaaggaaatgaaatcaacatgtcaaagagatatctgcactccatgttcacgttcattgcagcattatttaaaatagtaaagatatggaaacatcctaaattcccatgaatggatgaatgaataaagaaaatgcatacagacacaacagagtaatgttcatccttaaataagaaggaaaccctgcctctgtgacagcatgcatgaatctagaggaccttatgccaagtgaaacaagccaggaacagaggaagagtcattcatgatttcactgtatatattaaagcagtagacttgcagaggtagagtagaatgttggttaccagggcctagaggggtggactgggaaagggagatgtgggttaaagtgcacaacgttccagttagaccggaggtataagttatgcctttctaatgcacagcatgtcaactatagctgataaggtagtatatatttcaaaattactaaaaaaataaacattagaatttccccactaagaaatgataaatttgtgaggtgatgaatataagcggcttgagttacccagttcataatgtatacatgtatcataactaaacaacatatgtcataaatatatgcaaaaattatttgtaatttataataaaataagtttcatatttaaataattacattaagaaaatgaacagaaactttcagatttcaagaatattttatatatatatatatatatcttaaaacaaacttgcaacagaatatagaaataagttttacgactcaatggaaaagaacagaattcaataaaaactggctaaaagaaacaacagctgcatcattatagaaaattctggaataatcagccatataaagattctcactctcttagaactagaattccgtaggacttgtaattcctcctgacctgggtgggaggcaaaaggaagaacagctaatggtgattcagtgagttttatacctgtgtgtacttctgtgctcactcagcagaaagaaaagaagaaaagaaagaaagagagaaagaaagaaacagaaagaaagaaagaaagaagaaagaaagaaagaaagaaagaaagaaagaaagaaagaaagaaagaaagagaaagaaagaagaaggaagaaggaaggaaagaaaagaaagaaagaaagagagagagggagagagggaaggaagggacagcagaagtcattgtggtgtgtgtgaaagcacaatccttgggctcccccacatccatctctactccagtcccatcaatgtccagcaaatacattttctaagatgaagtattttaaactttctaaatcctgctagaaaacccctcagctctttcagttttgctctatcacttgaattattgaattaaatctagtttttgtgggcctatcaataccataagccaaaataacacatgaagaaattgcactgagacacatgaaaaccttctgaaagctccataatttcagatctgcattcttatttccccgaacctaaatcactgaatagagactcagaacgagttgatcttgttcctgaacgtgcacagagccaaggacatcctgtctgtctggaacagctcaggtttgttcctgtttctcctagaggatataaaatcttgagttagggaaaaacagccagggacaccctgggctttgttcttctctcccctggaggcaggatgtccttcagagctttgtcccagtgggtaacacagctgctgaggtgtacaacccacgtggcctcgttttggtcacttttgcatggtgagcctgctttgcaccatggcctacaatatgcgtgtgtaactaatctgtctccatcttcaaaatgacattattccacatcaaatctagtgcaggtgcctcacacagaacattctcaattacctccatcattcataaaattgatgccattaatttcaagtatacatacatcagactcatttaacgtattgttattctcattgtttgaaacataacttttagatcaaataattaacaataataaaaatataaattttgaagtcaggtaatgtgatttctctagttgtgttctctttgctcagaatggcttgggctgttctgcatcttttgtttttccacatatattttaggattttttaaaaatttctgtgaagaatatcattgttgttttcatagggattgtactgagtctgtagattgctttaagtattatggacattttaacaatattgaatctttgaattcataaacatggaatattgttccatcttgtgtcctctttatttcctcaatgttttatagatttattgtagtttttttttactttgttcattacacattgtatgcctgtaccaaaacatcacatatacccaacaaatagaaatatatatactattatgtgcttataacaattaaaaattatgtatgtatattgaatctattcaaaatcagaaactatttctttttactgtttgtaaggtcttgtctctaggctataaaaagaatttgtaaaactcaacagaaagcataatataaacagaattctaaaatgagtgaaaatctgaacaaacacctcaccaagaaaaaatgttatctgaaaataagaatatataaaattgttcagtatcaattgtcataaactgatactcatatttaccaaatacaaaagtaaacatgatgtatttcaacagaattgattctcaaatatttgtatactcatacagtggaatactatcagtcataaaaactatgggttattaattcagaagacaacattttaacattttttctaagtgaaggaagatggacaaaagagactaagtattgtacaattccattcatgagacctgctaaatacagtaaaattaaaaggattttaaaaacaggtttgtgataggcagggcttttggggaaagacaagagactgacttggcaaagctcaggggatatttttagggtaaaacaaactgtgtgccattgtgatatgcctaatttcttattatatttgttcagagttaatagtgtacgtttcaaccaactcggtgattttatattttctatttgctgatagagacatgttcatttttgtcaatcactttgctaaatgtggctgagaggctgttgaaatgaacgctgagcaaatgtattcaccaaatctacaagagcaaattatttgccaattgctgattgagtggggtctataatgtatttgagattgggtgtggggatgttattgtgtgagatcatgatgtttagaccatgacactctctggtgagggatcactcattcattgcacatttaatgaaaggcaggtaggaggagcagaaggggatgagtcacactcctgaccacagccacaggttattgaaggcagaactgatgtaatcccctaaggtagaccactgcccctccaaggtgaccttatcctagagttgacacacatcctgggacaccagagacaactccttctctcccctttctctgcacttcagctggaagcaactgtctcaccgagcaccttgtgttaaggaatgagagttcctgttccaggtgtgagggcccaggtgcatccacttgatccagcacaagagcaagaacagccttccagaaaatgacatcgcctgaggtataaccagctctcacctgctgcagcttcctctgaataaaaaggaaactgttgaaacttcctcataagtgtcctgctgtgccattccctttgtccccacatgttcagttgtgtctgtccagatgtcacttttgtgtagggagattagggttctgcttccagtaccagaacacacatgacctcttaggggacttcagggttttgctgacatatgtgatgatcttaaaagtcattagctccatttctacatcaaaaaacatctgaaccaaaggagcacataggctcaggcctgtaatcccagcactttgggaagccaaggcagaggaatcacttgaggtcaggaatttgagaccagcctggtgaacatggtgaaaccccgtctctactaaaaaatatatacaaaaattagccaggcgtggtggcactagcctgtaatcccagctacttgaaaggctgaggcaggagaattgcttgaacccaggaggtggagattgaagtgagctgagatcgcaccacttcactccagcctgggcgacagagtgagcctccatctaaaaaaaaaaaaaatttatatatatatatatatatatatatatataataaatatatattatatatcatatatatattttatataatatatatgtatatttttatatattatacatacatatcaatatatgatatataatatgtatatataatatataatatgtatattcatatattatataatatgtatattgatatatattacacatatatattttgatatatatatatctccaaaccatctaaatatcaagtattttttaatccatctaagagctgaaattgctgaaaaaactactccctccaaaagctgtagagacaggcacatccacagtcacagcagagacttgctgacttggaagagaagctcctggagacacattggtgagaacatttacctggtgattatgctgaatgtctggaggacaaatgtggactagggggagggtgagcactcctagaggctgtacaccccacacttgtgtggacttgccctccagggccttcaggttctcgtggaagcaattaaaatagattccctatagccatgaactggggaggagtaatcacggagaaaagatgcacaaaaagacttttctagaaagctcatccaagggaaggtattctccaaaatcttagtttatgtgggggaaggaaatacttccaaattacagacccctcctcctcagccttcctctatcacgcaaatgataaaattagccaagaggagtcagattcaaggcggtagccctgggtgcagcatctgcagaagggaggaaagagagaaaatcagctgtatcactggagattccttgtgaaggtcactgctcaggagaagagggcaaccaaaccagggagagtcaactgtaagaacataccatgctcccctgccccacacattacctcctcaacagcatcattaatatggattaaagagggcagtgtgattgctttagatctgtttgagaaagaaagtcacatactgaggcctagggtcagggtcggcggcacttcccgtgagtaagatactacgaagaaggaaaaattaggggtccataactgtgaaaatcagccacagtgtgtgtgagaatgtttgtgtttgtgtttctgtgtgtttgagtaggagttattggaacagcggacgtggagtgagctttaatccacatccatctgcagcttcaggtattctcagatgcagtattcatctgcaagagccgaaatgagaaaagagccacctccaacccccccagagttttagcctccctttgtttccagtgatccagtgcatctagacctccaggaagtggactccctggtgattttagcgattcttctcttggagccaccctgaagaggacattgggtttccaaaggcccattcactatttcaagaagtggtgccatcagctcatgttgtcactgaaggagcattctgagccagggcacagtcacttcctagtgagctacagaggctgagagaaaaatgctctgtgagacccaatgggaagctccctgcagtgcaaggtctgggtggcagggagcgctagggcctcgcccagcacaggctgcagccctggagcaggtgcaagggaggctggggaggggttcctcccagggtctgatgtcttccttttctcggacaaacatgctttaataagttaaacaagactttagtaaagactattgatgtgtctttgtgtctttcagtatacagttctatttgtaggatttatctaacctaacaagtcaatgagaatcacatgtaaaaggagaaatttctaggattttcagatatcttaataggtaggagatggagaaaagggatggttttattaattcagtgcttgccaatcttaacagagacagtagtaagacatgcagaaagcaaagcccagaaaagtatgaaggtgtcaaagtgccatttaagtatgggttcacttggaggaccatgttctgcgggaacttgttttcagcagacaatctattttagcagagttctgggcatacaaggggacacacatcattaaacaaggattgggacagggacttcagcgtcccactgttgcatggcccataaattatgtgtgttctctttctcatcttggatcaagtctagagctatgaaatagtatccctcatgaatatgcaaataacctgagatttactgaagtaaatacagatctgtcctgtgccctgagagcatcacccagcaaccacatctgtcctctagagaatcccctgagagctccgttcctcaccatggactggacctggaggatcctcttcttggtggcagcagccacaggtaagaggctccctagtcccagtgatgagaaagagattgagtccagtccagggagatctcatccacttctgtgttctctccacaggagcccactcccaggtgcagctggtgcagtctggggctgaggtgaagaagcctggggcctcagtgaaggtctcctgcaaggcttctggatacaccttcaccggctactatatgcactgggtgcgacaggcccctggacaagggcttgagtggatgggatggatcaaccctaacagtggtggcacaaactatgcacagaagtttcagggcagggtcaccatgaccagggacacgtccatcagcacagcctacatggagctgagcaggctgagatctgacgacacggccgtgtattactgtgcgagagacacagtgtgaaaacccacatcctgagggtgtcagaaacccaagggaggaggcagctgtgctggggctgagaaatgaaagggattattatttttaatgttgtttacagtatgtcattaataaattgaaaaaaagtaacaatagaagtatatactctaattatatgggaactttgttttttcagttttttcatttttttttttttttttggtttgtttgtgacagagtctcactctgccacccaggctggagtgtaacggcacaatctcagctcactacaacctccacctcccaggttcaagcaattctcctgcctcggcctccagagtagttgggattacaggcacccgccaccatgcccggtgaatttttgtatttttagtagagacggggtttcaccatgttagctaggctggtctcaaactgctgatctcaggtgatctaccctcctcagcctcccaaagtcctgggattacaggcgtgagccactgcgcctggcccaattatatgggaattgtttatataattatcaccctataagcaaaattcatggaggaggaaaagctctactgaagaaagctgataccggcattcccatgaaagtatctgtgtagaagtaagtattaaaatcagttgaataggcaaggcatggtggctcacgcctataatcccagcactttgggagaccgaggcaggtggatcacaaggtaaggagttcaagatcagcctgcccaagatggtgaaaccccttctctactaaaaatacaaagaattagctgggcgtggtggtgggtgcctgtaatcgcagctattcgggaggctgaggcagagaattgcttgaacctgggaggtgaaggttgcagtgagccgagatcacgccactgcactccagcctgggcgacagagtgaaactccatctcaaaacaaaacaaaacaaaacaaaacaaaaaaacagttgaataaagtaccttagagtcatctgttcaattaacatgtttaactccaaagaaatactgaaaatattttccaaaaaggaagtgccattttacgttcctaccaacagtgaataagattttcttttctggagccttgtcagtattcactaatgctttgctgtgcagccgttgtaatattatagtaaatgagtagcagtatttaatggttgttttaaatatacatattcttaatacaaagtcttgatgaacacttttttatacattgttttatgaggtgtgtgttcagatctatgtatgccagaaatgcctggcagcgttaatttaagcacactgtgagaatgaccctatagtttatgaagaatgtatgttcagagctctgagctaagaaatccaggagctgtcaacccagaagtttattccttgtctgtgaaggacatctgaatccctggcctatcccttggaacacaggatgtccaggtgattgatgctctttgttaaatctggaggttgctaggtagagggtgctaagtgaaaatcataatataaactacacgtgttttacaaatggtagtggttttcctgtccaacacacttttcctgggccacattgtatgcaagtcctcaatacaccctaggtcttgttcatgggctccaggtctcctcttcagccttttggacatggtgccatgcctattacagtcaataggggtctagcatgacaactggtaggcccagaacaaggtcaaagaaaatcctgcaagctcttagacaacagtgtcaaggaaggggagacctgtggggaaatcccaggcaggccatgcacatctctgtgggcccaacagctgcaatccttgatggatggggcccgctgcatgtgtacggggatgcctccaaaatgccaaaagttctggaggacctgttgcctgaggtggatgtgacaatgtgacaaagtgacagtcagattcctgagctgtggcagctgttggccactcctgactgcactctgagcaaccactgaggcagagctcattgcacaggctagggtgtgtcagccacgagaacagttgtaactataatgagatgccgcctgtagggataggatagcaaattggagaccattgtttatttggtaggccatttaaagtgttgctgactgccacaccaatgcattaggactactatgactacgtcatcctgggagcctaagtcctggcgtccgatgtagagctccagtgggaaggagatgaaggttaggatgagtccataaaggttcttgctctgcagcccctgctttgctgtctcacttggtgaacagagaatgggaggtcaatgcggacaaagtccagggtccaggcttatcagtcaaatacttggtgtcatctggttacataagactatagttattccatatttcatcatagataagataagatgcaggtctactcatgtcccaccacaccaaagcagttggaaacctcccaaggcctcctgggacattggcgatcctttattccccatttcggcaaaccccttgggcccccatggcacttagacaagaaggtgccccactgcgactgttccaaaagggaggatgagggctctgaagaagctgaagtcacagtgaaatgaatacaaaccttgggagttctagtgcagggacagccctgtgaattggatgtagtcagttaccctgaggggtttaggtggggactgtgttaaaggcaaggacataagtgtgtgtccctaagaccctggtctcaaagacagaaggaagctgaagtgagatatactgtttaggagtagcaactgcactacatgtcatgccttacgagtgtaggatgtgacaaagagggccactccacatccggaacaacctttagcaggctggctaaaggatgccttccagacacaaaagccttggaatgccaggacacagtctgtagccaaatggtacttgtggtggtcaccaccaacataaaagtgggccaactgtgccagcagaagttagccccacagaactttcccccacctaagagaaggcagtgcaccacaatgcggaattccaccactgtggaattgggggagcttagaattggattcagacacaaggggagagagtggatcacagggtggcttctctatgggatagggggtggagagtattatactctctggactcaagatgagtaaaatgacacccatcacaaaccatccagccctatgatggcacctttatggtaagtggttgcaggctccaagggggccgggtccaatgaggaagatgcccccacagctcgttctcaatggcagactatagaagagttgcaggatatcttctgggagtcgagatgaggcatgctaattatgctgagaattattgaagtcccaacaatgaattgtttactgcaaaataaaagctacagttatgtattcagtgcctacccaatggcatggtgcactgatttccacgttaagccccctgggagggcagccaacatttcatgtgccccaggtagttgctgacttaggagaaaagaagaaactgagtaagcaagggatgcaccctactgtgatgaagaacaatggcaccaaaggaagagagacagccaaggagccagtcagggtggccagacaacgaatgtgctctaactggcaacacctaccagttctctgggcccatagcggcaataggtggttatggaagggccacggaagtcagaccggttgaactagtgatacgacctgggggactgccacccagaccctgtgtagtatacacagcttccatcctagaacacatgagaatggatatcttcttaggcgtgaccctccaaacaacggccagggaattccaacggagagttagagtggtgatatgtgtgaccaagcagaaggcaaactggatgccagtagagctgccaacccatggggagtcccacagctggagcaacaccacccgccctgggaggggaagatgatccaatcatgaagattgttaaggagctagcccaggtaggcattaggaggccactgcatggttcctacaacagacctgcatggcccatgcagaggccagttgagacatggagaatgacagtagattactgggagttaaataaggtggtctcccgagtgaatgcagctgttcctaatatctcctccagtctgacgagaataggagaggtgttagccacgtagcatttccttatcagtttagtcaataccttcttcagcatttctgttgccccagagtcaagatcaatttgcattaacctaaaaagaacaatggacttttactgtcttgttccagggatatttacacagcccaaatctcacagcctagtgacctccaacctcagtcgatgggctgacccaaaggggatacatgttttccactacattggtgttatcatgataacctctgagtcttttttcagcttataaattacagcccctgtcttgctgtctcacttgctgaatagaggatgggaggttaatacagacaaaatccagggtccaggcttatcagtcaaatagttggtgtcatctggttgggtaaaactaaagtcattccatctgccatcatagataaggtgcaggcctacccacgtcccaccacaacaaagcagctgcaaactctcaaggccttctggagcatcagtgtccttttattccttttatttgacatccctgaaggaggctgctaggggagactgtgtccctcctaaattcatgtgctgaagtcccaacccttggtccttcagaatgaaatcatacttggattagtgtcctttaaagaggtgaataagttaaagtgagattcctggagtggggccctaatgcaatctgactgttgttataagaagaggaagcaggagggagggtgcacaggccccgagggacggccatgttaccacagaacagtgagaaggcgccatctgcatgccagggagcgagacctcagaggaaacccacccagctggcagcttgatcttaggctttcatcctccataagtgtgaggaaattggttttgtattgtaagccatccgatctgtggtatttcgttataaaagccctataaaatgaatacagtaggtaataggagagcttctatacattgaaaaagtcggatggccagaaaaacctagacactcctgttcagacctgagcagggtgatggacctgctttgggacaggagaggggaagagatgaacccagcacccagacccagctgagcccattcctcagcaggccgtccctgggccggagcttgcacaggtgtgaaagagcctgtcttggtcttcaggggctcatggagttggacggagaatggtgtagactcaagaacacgtcatcggtgtgcccgtgtttatctgaatgggatgtgtttctagggtgtgctcatccccaaagaagaattaatcaggtctcttgggctaaaaagaggttgtggcatttgtgtgtattaataactgtggtcggacagtaaattatgttaaactgcttatgggaaggcacaatggaaagaaacactttgttacagaaggaaaaaaaaggtgattatttaaatgaggtgcctttgaaggtcaccatgccaagaggagcccatcacatgatagtgctggctttcatgttcaggagatcaggagggtccgtccgctggcttttatgacaccctagacagagctgagagtgtaatgtatgaatggaggggaagtggagagaggggaggccaaatgtttggtgggaatggagggtcactattggagccattaggaaatacacaagcatgaattatgctggaggacagaacagtgttcctggggaatattgtgttgctttgggagctgctgaacatacaggagtttcactgttcctagttctcaaattctctagactctctggacaacccagttttaaatattgggaatataggtaagacacattcgttattaaaaattattaagagaagatgtaggaagaaatttaaagtaatccatttggttatgaaaatttagttacagcgaactgtgatgtccgtttcttacttggaataatggaatgtaagtcattagtcatctcaacggttcatttttccataaccatcaattacaaaactgctgagtaatttcctgaattgcccaccatagaaactgacctcacatttcctcaatgagaaactgccagtcccgttgatccagcctcgttcttcccatcagggattttgtatctctgtggacgtgtggcacagtgctgcatatccatcggcatatggcctcaggaaaggcgccagcctatccatgcatgatgaagcttacttaggggatgaagcccgcatgctgggtgagccagtgccaacagctgaaagaatcaactgcctggtgtatgatgcttttatgaaaacaagcccagggcctcttgcattcttctgtattagattctctggtgaagatttttattcatttctgcctgaaattgccacatataattacctggaagcattacaataaactgatttggaagttaactgacttcctggtgaggttaaaatgagtgtcaggtgcatagtgagacagaccggagacatggatgcatagcaaacttgtgctcaccatggtttctatcttagttagggaaacttctgtaccttccttagatgttcaggcactccattgaggaccctggcataacattatttattgacagaccatagctcaaagtatagaactggatactaccaaggaggatatactattactattttatctttatcttaaaatatactcttccatctgaggtgaaaattaatccagatggtagaacttattgcagttactacagcattttagcaaatcaaaagccgcagaacaaacatatggacagatggcaggtatgttttcggaatcgtaaacaagttcgtgatgactgtaaaaccaaggggtgtctcacgagggctggaaacctctcacaatgaaacaacacaatgaggatctttgaaaagtactctgacctcctggtgagctggctgatatggaggctgagctccatgtagaaagccaaaggaatttctgcaggacgtcatcatgccaagcacagccgtaacctgggtcccagcccttttcacacgctcaatggttagatcttgggagggaatcaaagaagccatagtaaaatatcaaaatttaaaccccgattttgaatttaaaaagtgttaaaatatggttgtggcctacactcagaaaatctgtgtccttcagatggtttctcagtggcaccagatggtttcaagtggctattcattaagtttctcagtgaaattaccagacatagaataaataaattgtcactgtcttaaatcaacccatgggaaaggaaaactgtgtaaatacagcagagaggaaacattgctcaagggaaaaacaatctccagaaagtattgttaaagaaacagaggccctctttccagccagcgccgagcgatgggcacctctcgggacaactggcacaagggccgcaaagctgggggcaagagaaggccctgccacaagaagcggaagtatgagttggggcgcccagctgccaacagcaagactgacccgtgccgcatccacacagtccgtgtgcgaggaggtaacaagaaatactgtgccccgaggctggacgtggggaatttctcctggggctcagaatgctgcgctggtgaaacaagggtcatcgatgttgtctacaatgcatccaataacgagctggttcgtaccaagaccgtggtgaagaattgcatcgtgcccatcgacagcacgccctaccgacagtggtacgagtcccactgtgcactgcccctgggccgcaagaagggagccaagctgactcctgaggaagaagagattttaaacaaaaaacgatctaaaaaaattcagaagaaatatgatgaaaggaagaagaatgccaaaatgagcagtctcctgggggagcagttccagcagggcaagcttcttgcgtgcatggcttcaaggccgggacagtgtggccgagcagatggctatgtgctagagggcaaagagttggagttctatcttaggaaaatcaaggcccagaaaggcaaataaatccttgttttgtcttcacccatgtaataaaggtgtttattgttttgttcccaaaaaaaaaaaagaaagaaaaagaaacagaggcatcacacttactagaaaaacatattctatttcatatattatggggatatgacgtgatgttttgacatatgcgggcattgtgaaattattaaatcaagtaaataaacatgtccatcacctcacatacttattttttatggtgtaaacgtgtaaaatctactctcttatcagttttcaagtatatagtacattagtatcatggaagtcaccatgctgtgcaatagatcttcaaacgaattccttctatctaaccaaaactctgtaccctttcaccaacgtctcagctttcacatgcccctgacgccagcccctggtaggcaccattctactctctactctgagttcaacatttttagattgcatgtgtaagtgagatcatggagtaattttttatacctggcttatttcactcaacataaagagtcaaatgctcaacatcactaatcatcagggaaatgcaaattaaaaccacgataagatatcacctcacacatgttacaatggcttagtctcagtctgtctttttgttactataaccgaataccagagactgggcaatttctaaagaaaaggaatttatgctttatggtgcttgagtcagagaagtctaatatcaaggcactggcatctcacaagggccttctcactgcctcatctcacagcagaggtgggtgagcaagagaccatttgtccacgagagaaaagagaccatcttttattagaaattcactcctataataactaacccactccattgatagtgacagtaatccattcatgaggacagagccttcatgacttgatcacataataaaggtcccacctctcaacactgttgcattaaagattatttccagatcctaaactttgggagacacatttaaaccatagcattccattcctaatatcaaaatttatgtccttatcacaatgcaaattacattcattccatcccaattgtctccaaagtcttatccagcatcagtgcaaaagtctgaagtccaaagtctcatctaaatcagatatgagtgtgactcgaggcacaatttagcctgatataaattgtttccatctgcgagcctataaagtcaaaacaagttatctactttcaaatacagtgaacaatggggcaggtatgggatagaaattcccattccaaagctcagagagaggcaaggagaaagcggtgcctagttcaaaacccaacagggaaaaaaacattaagtcttatagctggaaaatcatcctctttaacggcatcttgtgcacactggggagggggatgggcccccaaggcctccggcagtcttgcctctatatattttctgggttcagtccactcagccgctctcacaggtgggactctcaggcctctagctctcctaggctgactggaaactctttgtggtacctccaaacccacatttctgcttggcattgtgctaagggcccagtgtggtgactctgtctctgcaacaagtcactgcccgagaccttaggctgtccttaggctgcccgagaccttaggccgtccacagcattctttgaaatctaggtggagaaagccatgccctcgtggttcttgtattctgcacacctgcagaattaacaacacatggatgccatggaagttgatgacttgtaccattaaagtgatggcttgagccacacctaggtcctcctgagccacagcatgggcagccaaggagtgctgtgcctggacaccgggaacagagtcctaaagtgcctgctagaagtcaggccatagatttccttcaaatttctcccaccatataacctcgttcatggctctgaacttccaccttacagaaggacctagggatgaacacaattcagccacgttctttgccactttatggcaaggatggcctttgctccattttccgatgagctattcttctttttctcctgagacctcatcagaacggcctttattgtccacggttctactgacattctaatggtcatcacctaaataatctctaagaagtttcagaatttcctcacagctctcttcttctgagtcctcaaaagaatcacctctagtgttctattcagggcaatccagactttttatagtctgatcctccaaattattccagtctttgtgcattactacatccacttctacattttggggtatttgttatcgcaacagccccacctcttgatactgatttttcgtcttagtccactttgtggtgcaatgagtgaataccacacactggctaaagtataaggaaaagaaatttattttctcgcagctctagaggctgggaagtcaatatcaaggtgttagcatctggcaagagccttcttgctgtgatgtccatgtggaaggcaggagagcaggtgcgaaggatggaaaggggtttaaactcattttttaatgaggaacccaggcctgtagtaactaatctgctaccacaatgagtaacctactctgacgataatggcattcattgcttcatgagggcagagccctcatgacctaatcatttcttaacattcccacctctggacactatggaatttgggattaagtttccaatacacatcctttctaaacagcaggggctttttaataggttgaccacccaaggctgcaggaggctctgaagcagtggcctgaggttggctgtcctttgtgagaatggagagaagtgaactgactcatggagacacaagtagatgaggtaaaggcattcattgcttcattacatggatggtgaggtcgattgaaggcattaacggattaaagatggtggcaaaaccgtctgaggtggagaccacggggagtccatcagaaatggaggacacgtcccaataaatggtgcttcatttccctgcaaagcagaagaaagcaaagaacaaaacacaacatcatagtgtacactgagcagtggattgagagaagagtttcctaaggcataactgacagagtggagaagacacacaaatctttgcatgatgctaacatttggactgtggcttcattatttcttattaatattttactgaaatatcgctagaaggagactgaaaatgaagtgtgaaaagttaaatgggatttctgctctatgtccttttcagatgagaggaactagggaattccagggaagaaacaataatagctgctgagcaaggcttttgcagggcaggacaaggaatccccaaagagaaaacggaaacctcagcttcactttgcatctgctcctgagccaggtcctgagcgacccctgtaggtcctgagtgcccctccgtaggttctgagcatcccttggttgctgggcgccctctggtggtgtctgagcccctctggtggtttctgagccccccgccttatgtctgatcctccctggtggtgtccgagtgcccctgctagtgtctgagccccctggtggtgtctgagtccccttcttagtgtctgagccaccctattagtgtctgaggacccctgatggtgtctgagcccccagttagtgtctgagccaccctattagtgtctgagcccccctggtggtgtctgagcacaggagagctcctctgaaggaagggtctacatggggacaggcgtgcttgtctcagggaagggtccatgtggggacaggtgtgcttgtctgaaggaaggttccacatggagacaggtgtgcttgtctcagggaagggtccacatggggacaggtgagcctgtctgaggggacagaagtgcttgtctcaaggaagggtcctcatgtggacaggtgagctcttttgagggaagggttgacctggggacaggcatgcttgtctgaggtaagggtcctcctggggacaggtgtgcttctctcagggaagggtccacgtggggacagaggtgcttgtctaaggcaagaatccaagtagggacaggtgagctcgtctcagggaagggtccaggtggggacagttgtgctcatctgagagaagcgttgaagtggggacaggtgtgcttgtctcaaggaagggtccatgtggggacaggtgtgctagtatcaagaaagggtccacatagggacaggtgtgcttctctcagggaagggtgcatgtggggacaggtgtgcacatcggagagaatggtccacctggggacaggtgttcttgcctcagggaagagtccaccttctcagggaagaagtgtgctcctctgagggaagggtgcacatggggacaggtgtgcttgtctcagggaagggtccatgtgggaacaggtgagctcatctgagggaagagtccacgtggggacaggtgagctcatctgagggaagggtccacatggggacaagtgacctcgtctgagggaagggtccacgtggggacaggtgagctcgtctgaaggaagggtccacttggggaccggtgtgctcctctgagggaagggtccacgtggggacaggtgtgctcctctggagggaagggtccacgtggggacaggtgagttcatctgaaggaagggtccacatggggacagttatgctcctctgagggaagggtccatgtggggacaggtgtgcttgtctcagggaaaggtccacgtggggacaggtgtgctcaccttggggaagaggacagatgagctcatctcagggaaggggccatgtggggacaggaccaagggttgggacttcagcacaagaatttaggaggaacacagtcttccctagcagcctccttcagggatgtcaaatattttccttctgttccctgtgaaagccttaaaggggtagggaaagggcgttcaacctgcacactcgtagaggggaaaccagcttcattagtaatcgttcatctgtggtaaaaaggcaggatttgaagcgatggaagatgggagtacggggcgttggaagacaaagtgccacacagcgcagccttcgaaacacaccacggtcacgttaagtttaaatggagtgaccacattcgccaggaaagggaaatatttacacttttgaagaaacagtaatttgtgtttctgattatgatctggccttggattttccctcccctcataagcaatgacagaattggcagaaatatgtgaaacgttagttctcagacatgagacacccacagagggccccctgtgcccttccctgagagctgatcagctcctgcatctgaagaaatgaccaaagaccaggagagaaccacacagaagcatcggagggacagcacctggggctctgatggggtcaggaatagcatctgttcccaatagatggactaagtaaaaagtatcataattcacaagagttttacatagcacagaagaaaaagttaccctatatcaactgttgatcttgtgaatccaggaactctggattcaaggtggtcgggcacatcttgatttacgcatttcagggacacatgagacatcagtcaatataagtaagaaggacattagttccatccagaaaggctgagacaactcaaagcaagtcctccccacttagggcttccaggtcacaggtaggtgagagacagatggttgcattcttttgagtttctgataagtgtttgcaaaggaggccatgaggatatgcacctgtctctgtgagcagagggacaactttaaatagactgggaggcagatttgtcctgagtggtttccagcttgacggggcccaagatattttcctttcacaatctggtaacttcaaacaaaacttcaaagccacaacaaaacaacacaacaacaaaaagaataagacatgggtacttattaagagtagaaaaacattcagtccccaaggaaaatattggcagtgtctacctccacatgacaaaggagtaagcagtgtgagccacagaaaggagcactattaacccacagagcaaccgagaataacacgggtgatgcgagggcattggacgcacatcattgcattttgtagattcagaaagaaacggaaaagattgacggtggtaaaagagacagccctgcttccctctcccttttccctccccgatgaggcctcacagccatgaccctcagcctcatcccgcagtgcagcagctgccgtcctgtccaggcccaccccctgccccgccctgggactgttacctcattccctcccggagtccaggtgccccccggggtgtggtgcgggagcctggggaggccctttgttctctgtcagggtctccctgggagggacgcagccaccgcagctggttggggcctggcttcgcccaggacagtcctttcctttcccattgtctttggatgactatcgctgggctgggacatgaggcgggcagaggcgcgggtcacccttaggacccccctcttgctgctggggctctgggcgctcctggctccggtccggtgttctcaaggccgtcccttgtggcactatgcctcctccgaggtggtgattcccaggaaggagacacaccatagcaaaggccttcagtttcccggctggctgtcctacagcctgtgttttggggtcaaagacacgtcattcacatgcggaggaaacaccttctttggcctagacatctgctggtgacaactcaggatgaccaaggagtcttgcagatgggtgacccctacatccctccagactgctagtacctcggctacctggaggaggtgcctctgtccatggtcaccgtcgacacgtgctatggggacctcagaggcatcatgaggctggacgaccttgcgtacgaaatcaaacccctccaggattcccgcaggtttgaacatgttgtttttcagatagtggccgagcccaacgcaacagggcccacatttagagatgatgacaatgagacagaccccctgttctctgaagcaaatgacagcatgaatcccaggatatctaattcgctgtatagttctcatagaggcaatataaaaggccacgttcaatgttccaattcatattatcgcatatatggcaatattacaacttgttccaaagaggtggtccagatgttcagtctcattgacagcattgctcaaaatattgatctgcggtactatatttatcttttgaccatatataataatcgtgacccagcccctgtgaatgaatatcgaattcagagtgcaatgtttacctattttaaaacaactttttttgatacttttcatgttcattcatccacactacttattaaatacgtgccacatgaatctaactatgaacctgaaaggtataacttctgttcccgtatagccctgttacacattggtactccaggcagacattatttattggtagccgtcataataacccagacacagatgagaagtattggtctggagtatgatgataactactgcacatgtcagagaagggcctcctgcattatgcagcgatttcctgggatgacagatgcgttcagtaactgttcttatggacatgcacaaaattgttttatacattcaggccggtgtgtttttgaaacacttgctcctgtgtataacgaaaccatgacaacggttcgctgtggaaacctcatagtggaggggagggaggaatgtgactgtggctccttcaagcagtgttatgccagttattgctgccaaagtgactgtcacttaacaccggggagcatctgccatataggagagtgctgtacaaactgcagcttctccccaccagggactctctgcagacctatccaaaatatatgtgaccttccagagtactgtcacgggaccaccgtgacatgtcccgcaaacgtttatatgcaagatggaaccccgtgcactgaagaaggctactgctatcgtgggaactgcactgatcgcaatgtgctctgcaaggcgatctttggtgtcagtgctgaggatgctcccgaggtctgctatgacataaatcttgaaagctaccgatttggacattgtattagacaacaaacatatctcagctaccaggcttgtgcaggaatagataagttttgtggaagactgcagtgtaccaatgtgacccatcttccccggctgcaggaacgtgtttcattccatcactcagtgagaggagggtttcagtgttttggactggatgaacaccatgcaacagacacgactgatgttgggcgtgtgatagatggcactccttgtgttcatggaaacttctgtaataacacccagtgcaatgtgactatcacttcactgggctacaactgccaccctcagaagtgcggtcatagaggagtctgcaacaacagaaggaactgccattgccatataggctgggatcctccactgtgcctaagaagaggtgctggtgggagtgtcaacagcgggccacctccaaaaagaacacgttccgtcaaacaaagccagcaatcagtgatgtatctgagagtggtctttggtcgtatttacgccttcataattgcactgctctttgggacagccaaaaatgtgcgaactatcaggaccaccaccgttaaggaagggacagttactaaccctgaataacactaattcagcctcccgatccctgtaaagatacagagaatataacagcaaaatctatgaaacaggatcaggggaagggatggcaaagctcaagtccacatttcttgaagtccacaggaagcacagggtcctgtttcacatcacagggaaacgggaggcattggcttctgtcccaggttcttgtaggtcgctgatgctcactctgaaataaatcttcaaaaacacacattggtgccttccacattttcttagactcctctgggagcccaaacttggccagaacctcttgcctggagagacatgaatgagcatctggctcttgtcctgaggtctctggtcccagaattaacggaagttgccaccagctccttacagggaacattcatgacatttctccagaagagagctccagagcaatgagcttcctcattccccaggtaatctgtccttctctaaacccgaagtcagtttagggtgatccagggctactccctgttccctgtctgttcctcacgggggtgctgtgggctttgcagtgagagggacttgggttcaaatcccccaccaagcaaatccccctacctggggccgagcttcccgtatgtgggaaaatgaatccctgaggtcgattgctgcatgcaatgaaattcaactagaaaaataggtagacgtgaggggcaagctgtctgtcatttagtgtgagctctgtgagtggcagctgccccctttcttcctgcccccacatttccttgaactgaaacaggaagggaagctgagtaagtcgtgatgaggaagagaaaccaggcttgtagcagcacaggctggtccgggtggaaaacagggctaggtgtatcactgagttattgtaaaggaaaatggaagttaaatgtataaataactgaatgagataacattttattttaacttaaaattcacactaatattgacttttaaaatgcagtgtagatatgtcagagagaatttcaaaggcaaagcccaccgacggaagaaatcacccttcccataccatccacagaaaactgttggtattctagggtagtactgagatctagcatttttctgaatacatctgtggttctagatgtcctgcttccatagatattgtttagaattcccacccctttctccaaacacagcttgatatcctttctctgaacctgttagaaatttcctccattcagctgtcataaagatgcgagcaatccattcctgtgcctctgtcagtgtgttctattattttgtggctgaacgctaatggacagttaagtgtgaggtcagtgaatacagtgccctccctctatgtgtccttcgggtgtgaggggttttgctgatagagcagcaggccccatcccaccctttatgcatctccgccccccacctcacgctccagctgacctctcccctgtggcctggggcgttccccagggggaatgacctctcctctctccagggcccacccactcagtgcccgtgcaagaccaccacgcttggcacggccccacctcgtgtcagggcctgtgtcccctgccccaccccctaaacagatgggaaccactgggactctgctcagggcagggggcggaggtatgtgtgaaaggaaggcaaatgtgcactctgttggagaaatattataggtagtttgagcaaaaaatctaatgccatgggaacttttagaatgatacgtattttaacaaagaacatgaccaatagagtttgtattgaagccaggaaaacactatttagagcaacagcaatatcaaaaacacaagccaacagttcaccaagaaaaaccaccattaaccccatggaaatggtcttccaagagcatcggcacttaaatcctggaaatctgcctgcctcagcacctgttgtcctgacctgccctcctgtgtgtcctaatcactcccaaacacggggcctgcactgtgggagattcacactgtgccaggtggagggagcaggacaactgctaacaggttgttggtgtggatgccgaggccacccaagcaggtgtaaactcccacctgtggggcagggaagagtgcacgggagacatgtcccgggcatagggtgagggagagctgtgggggctctgggttctgaagtgggttctgaagagggttctggcctggcagggataagaccaaccagcatgtgaggccaggctggagtctggacctctgaagctgcaagggtcatgggctgcttggccccaggggctgtcctggttctctatggagtactttcaaacattctttcttcttccaatccccctccttctctcccaaagcctgcatctcccaaatcctctttgtcggatcctcggcttcactctgcatccgtcctgagcatcgatcttccaattccatcctcttctcttctgctatgtctaagctgctgtgaagccacctgctgtaatttactgctttatatttaatattgtaccgtacatctgttctgtttccctcatcataaatgcttcatttcatgctcagcatctgagaacacaaggccttgtcagctgtcacctccttccgttctctgtttccttcctcctatccccatattgctcatcatgtccagtctcctgccatcctgaatgcttctgatggaaggtctgagatgtctcatgagcactgtgaagattctttgtaatgtgagcttgttccaggcaggaattctccttcacccagccctggaagccaagtataggcagatggccatgctcaatcaaagactgagctaacttaacagtggctttggttttaaggtttctccaatccccagggcacaggatttcagggaattcaggtgagagtctgggtgttacccttcaggaggctgtaaactccatttcacctagtctacaccacagactatggaaactatatatatatatagttctgtccctctagagaaacctaatatgtatatatacaatatataatacgtattatatattatatataatacgtattatatattatatatattatatatatattagagtttattgaggagtattaaactcacaatcacaaggtcccacagtaggccatctgcaagctgaggagcaaggaagccagtccgagtcccaaagctgaagaatttgaagtctgatgttcgacggcaggaagcatccagcacaggagaaagatgtaggctgggaggctaagccagtctagtcttttcacgtttttctgcctgctttatatcctggccacactggcagctgattagatggtgcccacctagattaagggtgggtctgcctttcccagtttactggctcaaatgttaatctcctttggcaacaccctcacagacacacccaggatcaatactttgcatgcttcaatccaatcaagttgacactcagtatcaaccatcacaagtccaccccttgtcaacttgaacccatacaaatctcctgagatcatacataatcttcaaataaagacaataataaggtcataattacacctaatgtaatacaactatcttttgtacaaccagaaatgcaccaatccccaacccaaatgctattatgtaaagttaagaacacttaaatgctgatatgaagtcaataaattttatgtcacatgataaaggaaaaaagaaatgaaggaattttcttagtacaagtgtgtacatgcacaaacatgtttttaacaaaagaagaaggaaatactgatgacaattacagtcctcatttctgcaactgatcacgtggttgtagctggtattgatgactaccttcttctactacccattctgtattccctttgccttcagcaagcatcacagcaggtagagttttttctcctagtggagtgatgcaaaccttcattcctgaagggtctgggccatttgtagtcctgcctggattgggctgttgtagtttcccgttgaccttaatgacagggcatggtaatgttaagagacgccctaatggatctcctgtattccatacatattcttccttacctccattgtggagtaatagactgattgcatcttgatagtccaggtcaatcagcccagccaacactgtaactcccctcttagcctgtggacttaaaggtaggaggggcccaaagtggccaggtggaaatctttacttccagtttaatggaattgttgttgtttctcctgatggcagcattattcccactggaactaagacctctaggccaacagaatgtaatgtcatgggaccaggaagcaaaaattttgctagtggatcactaggggtgatggtgaatggtgccatttccacttccaccccttgattcctggatccatgaattatggctatgggagaaagagtaccatatattggatgctgatttggagcatacatggccttttggagagctttgccccagccctgcaaagtattggagcctagttgacattgtaattgtgactttgaaaggccattccattcttctatcaatccagctgcttcaggatgatggggaaaatggtaagacaagtgaatcccatgagcatgagcccactgccacacttctttagccgtaaagggagtgccttggtcagaggcaatgctatgtggaatactgtgacagtggataaggcattccatgactccacagatggtagtcttggcagaagcattgcatgcatatctgcagtaagtgtctatttcagtgaggacaaacctctgccctttccaggatggaagaggtccaatataatccaacctgccatcaggtagctcactgatcaccctgaggaatggtgtcatttgggtagagacccagagccaaaccagatcacgccacccaacccctcccaaatctcatgtcctctttgcatttcaaaaccaatcatgccttcccaacagtcccccaacatcttaactcatttcagtattaactcaaaagtccaaatccaaagtcacattggagacaaggcaagtccctttcatctatgaacctgtaaaatgaaaaacaagtcagttacttccaagacaaaatgggggtacaggcattagatacatgctcccatttcagttgggagaaatgagccagaataaaggggcttcaggtcacatgcaagcccaaactccagtggggcagtcattaaatcttaaagcttcaaaataatctcctttgactccattcctcacattcagggcatgcttatgcaaagtgggggctcctacaaccttgggaagctctcaccctgtggctttgcagctctgaccccatggctgctctcatgggctttgcagagttcagccctcctggctgctctcattgagtgcatgcagcttttccaggtgcacagtgcaagccgttaatggatctaccattctggggtctgaaagatggtggccctcttctcacagccccattagtcactgtctccagtggggactctgtgtgggggctccaaccccacatttcccttctgcactgccctagcagaggctctccatgaaggctttgcccctggcgcagacttctggctggacatccagtcatttctataaatcctctgagatctgggtggaggatcacaaagctgaactcttctcttccgcacatccctaggcccaacatcatgtagaagccaccaatgattggggctttctgaagcaatggcctgagctgtacattggacttttttagccacagctagacctggagcagctgggacacagggcaccaagtcccaaggctccaaagagaagctgggccctggacccagcccatgaaaacatttttccctgataggcctccaggcctgtgattggaagggctgctgcaaagatctccgacatgccctggaaacattttccccattgtcttgattattaatattcatctcttcattacttatgcaaatttctgcagccaacttgaatttctccctagcaaatgtgtttttctttactaccacatggccaggctgcaaattttccaaacttttatgctctgtttcccttttaaaaataagttcctatttcagatcatctctctcaagggcaaagttccacagatttctagggcagggacaaaattccatcaagcttggttttatacattttagagaggcatgagacatcaatcaaatacatttaagagacacattggtttggtccagaaaggtggaacaactcaaagctagggcttccaggctataggtgaatttaaatattttctggttgacaattggttgagtttgtctaaagacctgggatagatagaaaggtaatgttcaggttaagataaagattgtagagtccaaagttcttttgaagtcttatagtggctgcccttagagataataggtgacaaatgtttcctattcaaatcttagttgaactctttaggattgggaggttctagaagaaaaagatctagctatgttaatagagattctttacagatgcaaattttcccccacaaagaacagctttgcagggccctttctttctttctttctttctttctttctttctttctttctttctttctttctttctttcttttttagatggagttttgctcttgttgcccaggctagagtataatggcacgatcttgtctcaccacaacctccacctcctgggttcaagtaattctcctgcctcagtctcccgagtagctatgattacaggcatgcaccaccacacccggctaattctgtatttttagtagacacagggtttctccatgttggtgaggctggtctcgaactcccaacctcaggtgatccgcccacctcagcctcccaaagtgctgggattacaggcatgagccaccatgcccggcctgcagggccatctcagagtatggcaaagaaacatgttttggggtaaaatattttgattttcttatttgtctcataatgttatgccagagtcagtttggaaagtaaatcatgatatataggtttaaataaaacccatctgatgagaatttatgatttgtagagcatgcctccccagactctttagataggaatttgggcaagatgaaaaaaaaatcagagtttagtcctcactacctaagaccagctcagcttggacttcactgttcatgtcactatcagcattttagtcaaaaccactcaataagtctctaggaagttccaaactttcccacatcttcccttctcctttcaagttctccaaactgttccaaccgctgccaggaggtacccagttccaaagttgcttccagattttgagttatctttatagcagttccccactcctggtaccaatttactatattagtctgtttccacagtgctataaagaactgcccgaaagtggttaatttgtaaagaaaagaggtttaattgactcacagtgctgtgtggttagggtcggaggctcaggaaacttgcaatcatggtggaagtggaagcaggcatgtgacacatggcagcaggtgagagagagaaagagagagagagggaatgaaggaggaaccaccatacatggataaaaccatcagatctcatgagaactcactcactatcaggagaacatgaggacagcatgggggaaaccacccctatgacccagtcacctcccaccaggtccaccccttgacacataaggattactatttgagatgagatttgtttaatgacacagagccaaaccacatcagcatgtgacaaaggtctaatatcaagaatctatgagggggcagttccaaaatggctgaataggaacagctccagtctacagctcccagcatgagctacacagaagacaggtgatttctgcatttccaactgaggtactgggttcatctcacgggggcttgttggacagtgggggcaggacagtgggtgcagcccaccaagagtgagctgaagcagggcgaggcattgcctaacccaggaagtgcaaggggtcagggaattcccgttcctagccaagggaagcggtgatggacggcacctggaaaatccggtcactcccaccctaatactgcacttttccaacggtcttagcaaatggcacaccaggagattatatcctatgcctggcttggaggttcccatgcccacggaacctcgcttattgctagcacagcagtctgagatcaaactgcaaggtggcagtgaggctgggggaggggtgcccacaattgctgaggcttgagtaagtaaacaaagtggctgggaagctcaaactgggtggagtccactgcagctcaaggagacctgtctgcctctgtagactccacctctgggggcagggcatagctgaacaaaaggcagcagaaacctctgcagacttaaatgtccctgtctgacagctttgaagagagtagtgtttctcccacatggactttgagatctgagaatggacagactgcctcctcaagtgggtccctgacccccgagtagcctaactgggaggcaccctccagtaggggcagactgacaccttacacggctgggtgcccctctgagatgaagcttccagaggaattatcaggcagcaacatttgctgttcagcaatattcgctgttctgcagcctctgctgctgatacccaggaaaatagggtctgcagtagacctccagcaaactccaacagacctgcagctgagggtcctgactgtcagaaggaaaactaacaaacagaaaggacatccacatgaaaaccccatctgtacatcaccattatcaaagacaaaaggtagataaaaccacaaagatggggaaaaaacagggcagaaaagctgaaaattctaaaaatcaaagtgcctctccccctccaaaggaatgcagctcctcgccagcaatggaacaaagctggatggagaatgactttgatgagttgagagaaggtttcagatgatcaaacttctccgagctaaaggaggaagttggaacccattgcaaagaagctaaaaaccttgaaaaaagatcagatgagtagctaactagaataatcagtgtagagaagtccttaaatgacctgatggagctgaaaaccatggtatgagaactacgtgatgaatgcacaagcttcagtagccgattcgatcaactggaagaaagggtatcagtgattgaagatcaaatgaaagaaatgaagggagaagagaagtttagaggaaaaaaaagtaaaaagaaagaaacaaaccctccaagaaatatcagactatgtgaaaagaccaaatctatgtctgattggtgcacctgaaagtgacagggagaatggaaccaagttggaaaacaccctgcagtatattatccagcagaacttccccaacctagcaagacaggccaacattcaaattcaggaaatacagagaaccccacaaagatactcctcgagaagagcaactccaagacacataattgttagattcaccaaagttgaaatgaaggaaaaaatattaagggcagccagagagaaaggtcgggttaccctcaaagggaagcccatcagactaacagctgatctctcagcagaaactctacaagccagaagagagtgggggccaatattcaacattcttaaagaaaagaaatttcaacccagaatttcatatccatccaaactaagcttcataagtgaaggagaaataaaatcctttacagacaaacaaatgctgatagattttgtcatcaccaggcctgccctacaggagctcctgaaggaagcactaaacatggaaaggaacaactggtaccagccactgcaaaaacatgccaaatcataaagaccaccaaagcgaggaagaaactgcatcaactaacgagccaaataaccagctaacatcataatgacaggatcaaattcacacataacaatattaacctttaatgtaaatgggctaaatgctccaattaaaagacacagactggcaaattggataaagagtcaagacccatcagtgtgctgtattcaggagacccatctcacatgcagagacacacataggctcaaaataaaggcatggaggaagatctaccaagcaactggaaaacaaaaaaaggcaggagttgcaatcctagtctctgataaaagagactttaaaccaacaaagatcaaaagagacgaagaagaccattacataatggtaaagggatcaattcaacaagaagagctaactatcctaaatatatatgcatccaatacaggagcacccagattcataaagcaagtccttggagacctacaaagagacttagattcccacacaataataatgggagactttaacaccccactgtcaacattagacagatcaacgagacagaaagttaataaggatatccagcaactgaactcggctctgcaccaagcagacctaatagacatctacagaactctccaccccaaatcaacagaatatacattcttttcagcaccacaccacacctattccaaaattgaccacatagatggaagtaaagcactcctcagcaaatgtaaaagaacagaaattataacaaactgtctctcagagcacagtgcaatcaaactagaactcaggattaagaaactcactcaaaaccactcaactacatggaaactgaacaacctgctcctgaatgactactgggtacataatgaaacgaaggcagaaataaagatgttctttgaaaccagtgagaacaaagacacaacataccagaatctctgggacacattcaaagcagagtgtagagggaaatttatagcactaaatgcccacaagagaaagcaggaaaaatctaaaattgacaccctaacatcacaattaaaagagctagagaagcaagtgcaaacacattcaaaagccagcagaaggcaagacataactaagatcagagcagaactgaaggaaacagagacacaaaaaaacccttcaaaaaatcaatgaatccaggagctggttttttgaaaagatcaacaaaattgatagaccactagcaagactaataaagaagaaaagagagaagaatcaaatagatgcaataaaaaatgataaaggggatatcaccaccgatcccacagaaatacaaactaccatcagagaatactataaacacctctacggaaataaactagaaaatctagaagaaatggataaatttctcgacacatacaccatcccaagactaaaccaggaagaagttgaatctctgaatagaccaataacaggctctgaaattgaggcaataattaatagcttaacaaccaaaaaaagtccaggaacagatggattcacagccgaattctaccagagctacaaggaggagctggtaccattccttctgaaactattccaatctatagaaaaagagggaatcctccctaactcattttatgaggccagcatcatcctaataccaaagcctggcagagacacaacaaaaaaaaagagaattttaggccaataaccctgatgaacatcaatgcaaaaatcctcaataaaatactggcaaaccgaatccagcagcacatcaaaaagcttatccaccatgatcaagtgggcttcatccctgggatgcaagtctggttcaacatacgcaaatcaataaacgtaatccagcatataaacagaaccaacgacaaaaaacacatgattatctcaatagatgcagaaaaggcctttgacaaaattcaacaacacttcatgctaaaaactctcaataaattagatattgatgggacgtatctcaaaataataagagctatctatgacaaacccacagccaatatcatactgaatgggcaaaaactacaagcattccctttgaaagctggcacaagacagagacaccctctctcaccactcctattcaacatagtgttggaagttctggccagggcaatcaggcaggagaaggaaataaagggtattcaattaggaaaagaggaagtcaaattgtcgctgtttgcagatgacatgattgtatatctagaaaaccccatcgtctcagcccaaaatctccttaagctgataagcaacttcagcaaagtctcaagatacaaaatcaatgtgcaaaaatcacacgcatttctataacccaataacagacaaacagagagccaaatcatgagtgaactcccattcacaattgcttcaaagagaataaaataccttggaatccaacttacaagggacgtgaaggacctcttcaaggagaactacaaaccactgctcaatgaaataaaagaggatacaaacaaatggaaaaacattccatgctcatgggtaggaaggatcaatatcctgaaaatggccatactgcccaaggtaatttatagattcaatgacatccccatcaagctaccaatgactttcttcacagaattgggaaaaactgctttaaagttcatatggaaccaaaaaagagcctgcaatgtcaagtcaatcctaagccaaaagaacaaagctggaggcatcacgctacctgacttcaaactatactacgaggttacagtaaccaaaacagcatggtactggtaccaaaacagagatacagaccaatggaacagaacagagccctcagaaataatgccgcatatctacaactatctgatttttggcaaacctgacaaaaacaagaaatgggaaaacgattccctatttaataaatggtgctgggaaaactggctagccatatgtagaaagctgaaactggatcccttccttacacattatacaaaaattaattcaagaggattaaagacttaaatgttagacctaaaaccataaaaaccctagaagaaaacctaggcaataccattcaggacataggcatgggcaaggacttcatgtctaaaacaccaaaagcaatgacaacaaaagccaaaattgacaaatgggatctaattaaactaaagagcttctgcacagcaaaagaaactaccatcagagtaaacaggcaacctacagaatgggagaaaatttttgcaatctacttatctgacaaagggctaatatccagaatctacaatgaactcaaacaaatttacaagaaaaacaaacaaccccatcaaaaagtgggcaaaggatatgaatagacacttctcaaaagaagacatttatggagccaaaagacacatgaaaaaatgctcatcatcactagccatcagagaaatgcaaatcaaaaccacaatgagataccatctcacaccagttagaacggcgatcattaaaaagtcaggaaacaacaggtgctggagaggatgtggagaaataggaacacttttacactgttggtgggactgtaaactagttcaaccattgtggaagtcagtgtggcgattcctcagggatctagaactagaaataccatttgacccagccatcccattactgggtatatacccaaaggattataaaacatgctgctataaagacacatgcacacgtatgtttattgcggcactattcacaatagcaaagacttggaaccaacccatatgtccaacaatgatagactggattaagaaaatgtggcacatatacaccatggaatactctgcagccataaaaaaggatgagttcatgtcctttgtagggacatggatgaagctggaaaccatcattctcagcaaactatcacaaggacaaaaagacaaacactgcatgttctcattcataggtgggaattgaacaatgagaacacttggacacaggaaggggaacatcacacaccagggcctgttgtggggtggggggagtggggagggatagcattaggagatatacctaatgttaattgatgagtttatgggtgcagcacaccaacatggcacatatatacatatgtaacaaacctgcacgttgtgcacatgtaccctaaaacttaaagtataataaaaaaatttttaaaaaaagaaacacctgcttttttctgttttccatttgcttagtagatttttctccatccttttactttgagcctggggatgtcattgcatgtgagatgggtctcttgaagacagcatacatttgggtcttgcttctttctccaacttggcaattctctgccctttaattggggcatttagcccatttacattcaaggttaatattgatatgtgcatatttcatcctgttatcatgttgttagctgctcaatatgcagatttgattgtatagttgatttatagtggcaatcgttatgtacttaagtgtgtttttgtggtggccagtaacgttcttccattatcatatttagcaatcccttaagggcctcttgtaaggcaatctagtggtgatgaatacccttagcatttgcttgtctgaaaaggatcttatttctccttcacttgtgaagcttcatttggctagatatgaaattcttgcttggaatttcttttctttaagaatgctgaatataggcccccaatctcttctggattgtacagtttctgctgaaacctccattgttagcctcattgggttccctttgtatgtgacctgaaccttctttctagctgcctctaatattttttttcctttcaacctttaagagtctgatgtctgatggctatatgtcttagggatggttgtcatgtataatatcatgcagaggttatttgcatttcttgaatttgaatgttggcctctctggtgaggttggagaaattttcatggaggatagcctgaaatgtttttcaagtttctttttttctctttctcttcttaagggataccaatgtgtcatagatctggtctttttacataattgcacatttctctgaggttttatgccttcttttttattctttgttctttatttttgtctgactgagttaattcagagaatcagtttttaagctctgtgattctttcctcagcttggtctattctgctgttaatacttgtaattgtattctgaaattcttgaagtgagttttttagctctatcaaatcagtttggttctttcttaaaatggccatttcatctttcagcttctgtatcattttactttatttcttagctcccttggattgggtttcaacattctcctgaatctcagtgatcttctttcctgtgcatattctgaattctatgtctgtcatttcagccatttcagtcaggttaagaaccattgctgggaaaccagtgtgattatttggaggtaagaagacactctggattttagagttgcagagtttcttgcattaattctttctcatctttgtgggctgtttctttaatctttgaagtggctgtcctttggatgtttttgtcttttttgttgttttttggtgtgtgtttttgtttgtttgttcatttgtttgttttttgctcttatcttctttgatactcttgcaggtttgattgtggtataaagtggattcagttagctgtgtttcttgaaaatcttagagggtccaggctcacctcagcactcttgtggtgtgttctctgctctgggactgggcccctggctttattctctggccccttgagtttagaaacttgctgcattggaggggctgaggtgttcccagtccattggccacaacactatagtagggggtgccggccaaagcacttcattagagtggtggcagtgggatccattcttactcatgggtgccagcagttgtggagtcatggcagggtgcacatgcatctgctggggtgggggtactggcaggagcagagtggcagcatccctacataggttcctgctggcagtcacagcgcagtgaggtgcccgtgtgttggcagggacagggtggtggggcacacatgcacatgcttgctggtggtagagggagttgtgatctgctgtgcactcatgccagcaaagcagttgggaggtactatgggtggactggtgcacatcagcagaggctggcctgctggaggtctccaatggttaggcatggtctgctggcaaaggagctatgatgagggcccccaggaaacaccctggttgggcttccaaggctgtactgcaagcaggcacagccagcctggggccccaggagaggccagaaggcaaggaaattctcatttcagatgggccctgtcccatggacaagaccaccctgctttattcaggtcccatagtcactctaaggttaaaatctcctagaggaggttggtgagccttgggggatgggtgtcccctggctgtgctccactacagccattctcatgtcaaacactctgggctttacacagactggagtcctgcccctggcatctctctaagcagctgtcccttccagcacaagtgtccatgggggtcatggggtctcctgctgctaggattctggaggcccatggcaacagcaggccactcctcacctgttcaactcaacctttccccaggagttgctgggagccaggaatgagtcctggtgcttggcatccccatgcagggttcccatcttcctccaccttcagctcagcatctgtgtcctcccccgtctactctcaatccactctcaatgcctccccttcaaagatctgcttggaaagcacccgtcttcctgatgtctcactccctccatggcagatattcctcctggctgcatctagtcagccatcttgactcgcctccaaagtctttttaattaccacttcggttaaattagtaactatcattttacaatggcctgtgattctgttttgatcaaatattttgagccttttagcatctataacaaatgttctcaaaaatcaaaatcctaaatcaagtctctgccttagtcttatttctggggcttattaaggctataaaaattaatcaccataaggttgtacaagctttttacagcttccagtcaggctatgaactccagtatcaccacctccagcctgataattacatatattggaagaaaatcagttaaaggactccctctagacccttgaaagggtgtgagagacaacatggtttcgcctgccttcatgtgtcccagtccatccctgtggctgcctctgtccacctcagcttgcccactgtctttccttcccaactgtctgccctgctgacttctggcctcagtgacagatgcaaagacaaggcgacagccccacatagaccgtttaaccagtcccacatttgcataagctaaatggtcatgtcacagtctgttgcccaggctggtctcaaactcctgggctcaagtgatccacccaccttgacccccaaggtgctgggattacaggcttgagccacagtgcccagccaagaacccgtttttgagtgggcaccttggcacacacctgtaaacgcaacactttgggaggccaaggtgggagtgtggcttgaggccaggaggttgaggttgcagtgagctatgatggcaccacctcactccagcgtgggtggcagagtgagatcctttagaaaaaaaaaaaaaaaaaacttgttttctctgcagccgggctccgtgaccaaacacaaacacaaacttcccctccagagggtccaggaggggctgggctgcaggaggtgcttagggcctcttagggaatggtaagtgaccacccaacgcaggcactcagccccaggggcatatgcagagagagggtccaggaggagctgggctgcaggaggtgcttagggcctcttagggaatggtaagtgaccacccaacgcaggcactcagccccaggggcatatgcagagagagggtccaggaggagctgggctgcaggaggtgattagggcctcttagggaatggtaagtgaccatccaacgcaggcactcagccccaggggcatatgcagagagaggctgggaggacactttcagtgactggggttacaaaccccaaccataagacattgctggctctgtgagccgccacctccagaaatctcccacttagttcttagcacttatccactcttcccttttcctactctcaattcctggaggatgccctcctttctcaggctcagaccaacctaccagctccactctagacctgaacacatgactcctccctctgtctccacctggaaatctcatcagtgcctcacatttacactcctgaaaatcaggtcctgcctacccaccctcttgctccacctgattcctgccctgtttcagccagagaccttgcagtctcctttaactctcaaacccacccatgtcgtgtgagcatactgactgtgttctatgcaagaaagagcagtttcttggtggtcctgcggttttattagtccagaggcaaagcgttggcagagctggtttcttctgaaccctgggagggagattctgttttcatgccttttccagattctagaacccatattccttgctctgtgtccccttcttccatcttcaaaggccatcctctcatctctgtgtccatcatcacatcacccttcccctgactctggttctcctgcttccacttataagcacccttgtgattacatcatacccacccagacaatgcagggccatattctcccctctcgagattaatttaatcacatctacaaagttcctcgtgccatatgaggtcactaaaccacatgttctgggggtttgaatgtaaacatttgggggatgcattattcagccacccacaagcactgctccccactggccacacactatgcacagccgagatcatgcaagtgaggcacgttcatcaacagcagcttcagcaggaaactatatgctccactttcctgccatttgtatctggatttttttttcgctatcattgtagaaagagtggtattgtaaaattaaagatggattattttctttctagaacactttggcaatctatccaacattatttatccccttctgagtgtcaagtgtgaggtcattctttcattgagagctcaatgcctacaattatgataatgcatattgggtactttcacacatcagaaagttcttctttcttaaaatctgttcttgaattattcattcttctctagctttttgttgatctattttataattttagaaaaatcagaaagtaacttgaagtatctgtcatctctacaggtttacctccctctttgtggccttcagaatgtcatgacacgcttttcccttgctcatcacatggtttctatgtatgagacctcatcacaggagctgtggtcccccgggagcaggcatctgtggatggtgccttgctcctggctgctgggacctgtgtgctgccagtggcactccacgacagtgatttcccagctcagttttgcagctccagatggtgggtgagacactaggaccactttgtgaacagcgagggcttggggtttgcttttctaccatgtccagggctgctgttcatgagggaatgtttctaacctgacatcatggctgaagccaacttagaacctctctagccgtatggggagtaggtgagtgatacagatgttaattagctcagtggagccactcccctatgtagacatgttacaaaacattatgctgtacagaataaatataggtcatttttatgtgtcaatcaaaagagaaactaattatttaaaaaaaaaaaaaaaacctctctactcaagccgaaacctcagctccagtcccacaagtcacacaaggctgctcccgtcctgtgtatgttaaacctacctcagaaatgcaagggggcattcaggtttcattctcaattcaaatgccctttttaattttgtctattcctagcacctggcaacttccagctctttttttcggggctcattcattatttaaagcacgtataatttttcacccacattctaacacatgtagtactgtagagaatccttccctaggaggatctacagcattagaaaagaattaagaactccaatatttacaagaaggaaaaagcaaaaagagatcaaaaaatgggcaacttctagaaatagaaaaccctcatgagtatgatgataaatcgctggcacacatgtgaatagttacttgatgcttatagtgatgtctgggaaaataacatgaaatacttataatctgtttctcacacatgtaattcaaaagaatagagagaagatgatttgaaatattcttaagtttgtaggaaaaaagctacttccatatgcataattgcatgtattttgatactgccattattaagaactatctaagagggtccattaaaaataaaatttcttggctgggcacagtggctcatgcctgtatcccagcactttggaaggccgaggcaggtggctcacctgaggtcagaagttcaaaaccagcctggccaacatggtgaaacgctgtatctaccaaaaatacaaaaattagctgggcatggtggcatgcacctgtagtctgagctacttggggggctgaggcaggataatcgtttgaacccaagaggtgtaggttgcagtgagctaagatcataccaccgcactccagcctgacagacaaagcaagactctgtctcaaaaatattaaaataaaatttctcattcctattacagagtaatttaattcattaatgccctgccctgttacaaaactcatttgtaaaatactaattgtaattgtgaaaaaatggcaattgatactaattttaaattctaaaaacagggcacccatattaaagattattctgcagtaagagaattagctataacattttgtaataaggtggagaaaacattctccaacttacaatggttggtgagaagaaagtttccagcacggtagatggaccctaagagcccttgttgaaataataagacaaaaagatatacagagagatgagccagatgaagggagacagagagagagagagagagagagagagaggcacagaaatgagagatacaaagtgaaagagggcaacctgtggggtcatcagatatttgttttctgttttgtttattctaacataaaggcagtggtgggtcatcgatgtatttagagtttgcacaatcactgtggaacacagacagacacaggggaagaggagaaacacagggcggtggcttgcccttggactgttcttagttcctcaaaacgtaacagctttgcccaacctaagggaactttcagcagctgctcttctgccataggcctctttcctgccttgttttcatgtggctgactgtttctgttcctgcaggtcttagctcatcagacaggcatttattacctctgtgtcaacagtgggagcttccattactctctagcatgacactccccttcctcttttaggaaatttaacatggaagtgagtttgccatcggccttctccccacagtgttaacagtggtgaggaagccagcctgttccaccttgcccctcccatgattccaacactgagttcagacttgtcacatggaacttatctttgcatgtttgtggcacagacagatggacccaaccatggattagtggatggatggatggatggatggatggatggatggatggatggatggatagatggatggatggatggctgagtaggtgtgtggatggaagagtgaaaagatagatggatgcatgtatgggtggatgggtaggttgatggatgcatggatgggtggatggatgggtgagtggatgaatgggtgggtaggtgggtggctacatgcatggatgagtacttggatagataagtgagtggatggatggatggatggatgaatgggtatgtgaagggatggatgtattagagtgggtagttaggcaggcatgagctgatagtcaagtgattgttaaactgcctctctaaaataataattggtctcggctggacgcggtggctcatgtctgtaatcccaacactttgggaggctgaggtgggcggatcacaaggtcaagagattgagaccatcctgaccaacatggtgaaaccctgtctttactaaaaatacaaaaattagctgggcgtggtggcgtgcatctatagttccagctactcgggaggctgaggcaggagaattgcttgaacctgggaggaagaggctgcagtgagctgagattgtgccactgcactccagcctggtgacagagcaaagctctgtctcaaataataataataataataaataataattgatctcagccagcgccaagaaaaggcagtctcccaatagatagaaaacacccgaaactggtcatcagcagcttcctgataagatctcaggcattgggtgagtgggctcaagcatatgcactaagaggcaaagtggcagagtttaactggcacataatcttcctctaggaacactctaatagtaagagaaggacacctcaaatgagcatgtgcacatttcattaaacccactgtgtatgcagcccctcccaagtgctggcaggccactgtacatgtgggcagcccactccaagggaagaatcaagggagaagaaatacaaatcccagaaccatgtcaatgtataaaaccccaagtcaagggccggacagagcacttagatctctcaagtcgcccacttagccctcttccaagtgtactttacttcctttagttcccactttaaaactttaataaacatttactcctgctctaaaacttgcttgggtctctcactcttctgtatgccccttggccaaattctttcctccaaggaggcgagaatcaagttgctgcagacctgtatggattcgctcctgctaacagatagctggatgggtggacagatgcatgaattagtggatggacgtttggatgtgtgggtgggtgggtggattgtgggatggctggatgaatgcatggctggatgggtggacagatgcatgaattagtggatggatgtttggatgtgtgagtgggtgggtggattgtgggatggctggatgaatgcatggctggatgggtggacagatgcatgaattcgtggatggacgtttggatgtgtgggtgggtgggtggattgtgggatggctggatgaatgcatggctggatgggtggacagatgcatgaattcgtggatggacgtttggatgtgtgggtgggtgggtggattgtgggatggctggatgaatgcatggctggatgggtggacagatgcatgaattcgtggatggacgtttggatgtgtgggtgggtgggtggattgtgggatggctggatgaatgcatggctgggtgggtggatggatgcatggataagtggtggacggatggacgggtgagtggatgggtggatgtgtgtgtggatgggtggataggaaagccctctaattgattacagggctcagtgtgtgcttcaacatcatgatggcatcatcacattggtccctgtatgaagcagtgggggaggagagtgtaccaggggagcaggaatgacttttctccagaatcgacctctcccaccctgcagcctgggctgtgcaggccacattggagaaggtgcggtcgactactcctaaatgttgttgtgtccaatggcttgttgacgttgatgtaggaatgagcctacatctccaccatagatggaactgtttgggtccccaaagcagaaagcctcttctgttgcaggtgctgaagtttccatcttcttctgcttatacggaagctcacgcatcccttggatggcaggcgtcaggttcctgtgcgcactgagttccccccttacatgctttggacagaagtgtgagacacacaagattgctgcaggaagtccacctgtggggatgctgcgacttctccagcaagaacacgagtctgctcattgaccatcaccacacataacaaattaagtgtcccttttttgataacacgtcattgtttcacagagtattcttttaaagtgtataagttgactgcagttattattttttacttctgttactaatttactcataattaggcacaatttacacttaagaaatttcttaatagttttttcctccttaaggtgaactacagtcagataacatacttatcaattgtctctagctcttgtcagaaaaacatatagatgtgtgtgtgcgtgtgtcttggcctttccaatgatgaattaagatgtgcattgagaaggcattcactttatttgacgttaaggaagtaccaagaagacgctctccacagaccctgggaaagccagcagctgcaccccgaggctgtgccaggcagggaacaaggaggcagcaccacctgctgggcagggaaaatgtcctcccagtccctgccgcttctctgcagaggcacaaagagctgccccttctcctgggccttctcctgggctgatgagattgctccccgatatgccaaatcagggttgtgcatctgaggctctgtctagactctcagctccttcctactcctgcaaagtgaagaaaacaatgccaaggggtcctggaggcgtctctacccctggagagttttgactctcttcaatagtctccactaccctgccctcactccatgtcctccgtttctccctaaagcggtgcccagtctgattgcactgtggcagggataacgaggggccaggacatcaggggagagaagtttctacctgagtcacagcagcggctgccctgcagactcctgaagacacaagacacatttccatcccagagacccagcgaaatgcaacctcaggctagagacagccagttattttttcttgttctgtcctggagaggccactgagaaagtcgagccccttgttgaggaaaacatgagatctctgtgtgtcgtcctctgcctgatggctgtacctccatgtgagtgtctcagagatttcagaacgggggctgtgggctgtggtgtccgcttgtgactcatctctttgcttcttgtccctgagtgtcctgcatcagatgcagctactggagtcatgcccagggctggtgaggtcctcacagacctctgggcctggacccagcagccctctgggaaggcgctggggcacctcagctccaggggcagcacacacttcagcccagcctttctgggccaactctccatctgtagagacacatccaaggcccagttatccctgcagctgagctccgtgatggccaagggcagggccgcacattcccgtgggagacagaatggggacctcagcgtgagcccagacacaaacctccctgcagggaagcacaagaccaccaggcggcgctccagaccacacagcggccccagaagcaggttttagggggcggggcagacgtgtccgcgttgagtcaggtcattggttttactttccctgagcaaacggcctctgccaaggactcactgcacctctcaccttcacagttgttttttttttttttttaatcaccctgtagagttttgctagctaatttagatattgaggagtgcttcatacttccttgggcctctgcttgcagaaacatagcaattgtaaggaggcacgtgggaaagccccggctcggtgacccgggggatgctgctgtggccctggcaagagggcgtcgggccgcagtaacaaaggtgcagacggctctcagcctgcgcccgcggagtacaacacataagggctgtaacctaacgaaaaaagaatcgcagtgcaactgtcctgcatttgagtttgtgatcagttttgccctttgtctttaacaggttctaacataaaattttgaatgttggttcaagccctgtgggtaaaatgcacttacccacattccttaaacaaatagaacactgaggtggaaatgttttgaaaaagtagttttcagacatttggaaacaagcatcacaggatcataacccctgagaaaagaaaaacaaatgaacgaatcctgctattgcctgaaagcagctgccaggacacacggaaaggcttagtgagctgagcggacagagagcagagttcaaggcagcagcagcccgaggggaggagcaccggggagcaggctgctgtgcagccaggatgggccggggtggggcggggggagaacagctggagacttgccgcagggagggggatccctcaggtttggggctgagaactgacttatgcctgacttatgcctgcatgaaaagaaactactcgatatcagggggaaatcaccagaaacctgtggacccaaaactacacagagcctacacaaggaaagcattgtttgtgttctcccagccagggtggaaagaccttgagatatgtaaagcttcaagcaatcttccgaagtaatctcgtgagtagtggtgccacattaattcaggactaaaggctgctctgaactgaacctaagaaatgcttcaagtgtagcctggagcccgggtgcagtggctcacacctgtaatcccagcactgtgggaggccgaggcaggcggatcacttgaggtcaggactttgagaccagcctggccaacatggcaaaacctgtctctactaaaaacacaaaaattagctgggcgtggtggcagatgcctgtaatcacctcccacctggacccttccttgatacatcagaattacaactagagatgagattggggtggggacacagagccaaaccgtatcacataggaacctaaaaggataataaagtaggaaaacttcccacatcagtaaccctttatccgatagtaatcccaatctgcaaagtaaaactgtgtgattttactaagataacggaatcttctctacagaaggactttccagtgcaaaagctccccaccctcaccatgaaatgcacgtgaccatttccaatttgtgtaaagtcctcagttagtactgagacttcggaaggttagaaatccctttgctcatgctgcatggtccggatgagatgtaagaatcattagctaatagacatgcaacagcttttgtgtgaaagatgttatgagacatttaaggtatttgcttgtgattactaagcattcattgtatcattggagcacatgtgcttttataccctggagaaattccagtaattgaattgctgggttgaatgggattttgatttggattaaatttaaactatagattttatttagggaaaactggcatcttaattatgttattggggggcccttgctcccagagctcccaagatggtggcaggccgcttccaaaatgaccgcaggccacttccaagatggtggcaagcctcatgttctctgacctggggttcttggcctcacggattccaaggaatggaagcttgggccatgcagtgagtgttatagctctattagaagccgtgggtcacggaagagaaccgtggaacccagtgactagtgttcagctcgattaggacgaacccaggcacttagccgtgcaggaacaatggcgagcatttggcccgatcgagagtggcaatgggcgcctcgctggatcaggagcacagcggataccctgatggatccggagggatggaagccagcggtgggtctcccacgggggcaaacagcagtggtggacggtgagcgaaagcgaagctcgagccgtaacaaacatggaccagaagagtgcagttgcaagatttagtagagtgaagacagagctcccatacaaagggaggggacccaaagagggtagctgttaccggctcgaatgcctgggtttatatcccgatcattgtccctcccgctgtgctctcaggtgatagatgattggctatttctttacctcctgcttttgcctaattagcattttagtgagctctctttactatctgattggtcgggtgtgagctgagttgcaagccccgtgtttaaaggtggaagtggtcaccttcccagctgggcttagggattcttagtcggcctaggaaatccagctagtcctgtctctcaattacactgagttttccaatccatgcatccaatatgtggtgtatctcttcatatgttcatagcctctgagcaatgttttacaattttctgtgtaaagaactccacatcgttttatgtttcttctaaggtatatcctgattgctttttatgtcttcacaagttttttcctttcaaaattaattttccaattgtttggtgctaatatgctcaaatgtccttgattttcttagtttgaacagtccgtttttgttttggggatttatttttttttcagattctttaagattttctatgtctataaccatataatctctgaacagagacagttttgctttttcctttcaacttgaggtaggttttctgggtagttcaggacgcgcaggcactgggtgggtggtgttagcagctgcacgatgccttggagaggacactctcgggggactgtggccgctgctcagctgtgaccgttcttatagcaccagcagctgcggccaccattcttatccaatttccaaagccacaccacaggccctctcaagaacgaggcgtggaggctatgccctctcctggacacatcatcattcccaagccccacgatgtgggccccatgggacgcacacctttgtctgtccagacctcagccccacctcctcatcctgcaccagaactcttcagagcccagtgcatgaaatgggctaccaaggaaatgagggtaggttcctgagaggaaactggccctgcatttgggagctaggagtctgctaattcgcctggcagccctgtgcagccctccgtggctacagtccaccccgtgcccatcagtgcctccttcctgtgcaagcctggacctcgccctgggctcaggatgggctgtagaccgagaatgcaggcgggaaagtctttgtctatcggggccatagtcaggttctacagtgagtcagggaaagacctgtggaggtgtggatgaggacaatgggtccaccatcaacaggaggacacgggttcgaccccttgcagaggcacagtcccacatcactgggaggcagccacactcactgcctcgccctctcctcacacagtgcagtttccacgttcacagccccagccagtcaccaggaatgccctgggggcggcctttccccagtgcactccgagccctcccttggctgtgcggtgagctccatgcccaggagatatccacccatagtcctccggaaagcagctgacctgccatgccctggaaccacaaatccccacagatcagccagcctgcagtgggccttggatgtggtgaggagtggtggcacccccgttcccaccccacagatgcaacgcctgtgggtgacgcatgtgagtactgaggagtagagggtagaactgtaggccccgagaaccacagaaactcgggtgttacactctggggccatgtaaggagaaagtgtcactggacagaaacaggcccctcctagacactgtgtgcgccatagtcacctgtcattagctctcactcttgcagattcatgattgaggtggttaaaaaaaaaaaagctcctactcacccatccaaccccatcctggggtgtttccaccacccttggggtttgggatgagctgcccttgcccactgtgctctgtggacctccctttagaagctcacagctccctgcactcggctccatcctgccccaccacacagaagcaaaacccctctcctttccactgcaggcttttcctggaccagaatgctgacctgctgcccttcactcccgaagtggtgggactgcctggggtggtgtgggtgttgagccttcttactctagggacctggcacctggccccaggggcacagggatggtgcatctgcctagggatgcctcctcatgccagggggtgggggttagtaccatcggccctcaggatttgttgcatgaatgagtgaatgggtgaataaatgaaggggatctgatctatgaataagggtatatagactttggttgatgtaggacgccaaatgctggaatttcagagtcatcacacccaggggccctgcctctgagctcctctttgcatccaatctgctgaagaacatggctctagggaaacccagttgtagacctgagggccccggctcttcaatgagccatctccgtcccggggccttatatcagcaagtgacgcacacaggcaaatgccagggtgtggtttcctgtttaaatgtagcctcccccgctgcagaactgcagagcctgctgaattctggctgaccagggcagtcaccagagctccagacaatgtctgtctccttcctcatcttcctgcccgtgctgggcctcccatggggtcagtgtcagggagatgccgtattcacagcagcattcacagactgaggggtgtttcactttgctgtttccttttgtctccaggtgtcctgtcacaggtacagctgcagcagtcaggtccaggactggtgaagccctcgcagaccctctcactcacctgtgccatctccggggacagtgtctctagcaacagtgctgcttggaactggatcaggcagtccccatcgagaggccttgagtggctgggaaggacatactacaggtccaagtggtataatgattatgcagtatctgtgaaaagtcgaataaccatcaacccagacacatccaagaaccagttctccctgcagctgaactctgtgactcccgaggacacggctgtgtattactgtgcaagagacacagtgaggggaagtcagtgtgagcccagacacaaacctccctgcagggatgctcaggaccccagaaggcacccagcactaccagcgcagggcccagaccaggagcaggtgtggagttaagcaaaaatggaacttcttgctgtgtcttaaactgttgttgttttttttttttttttggctcagcaacagagatcatagaaaaccctttttcatatttttgaaatctgttcttagtctaatggagattctctaatatgtgacaatgtttttctcttgctgtttttggaattctttgtctttgacttttgacaacttgacttttgacagtgtgcctcaaagaagttctattttgggttctgtgaacctcctggatctgggaagttttcagctatgatttcattaaacgtgttttctacaccatttccctactcttttggaatacccataatgcaaatatttgttcacttaattgtgtcccataaatgctggggattttcttcattcctttttactctttttttctttttattcatctgcctgaattatttcaaaagatctgtcttcaacttcagaaactcttttgcttggcctagtctaatcttgaaggtctcaattgtacttttaatttcattcattgaattcttcaactctggaatttctgttggttcttttttatgatacttatctctttgttgaattcctcattcaaatgataaattgttttcctgatttcactgaattttctatctgtacactattgtatctccctgagtttcttagagattatccttttgaattatttttctgacattctgtatatttccttatgattggggtctgctactggagaatgactgttgtctttttcaggtgtcgtgtttcctggccttttcatgttttatgtgttcctacgttgatttctacacatctggcggaccagtcatcccttgcaatttaatggagtaggttttgcaggaaaagacttcctagtacagacgggtctcagggtgtcagtgtggcggggcgtgctggctttagttctaggttgacgcagtagcgtagtctccatgtcgtttcttcagctgccgtccacattggtgacgtttgcgagtgtctcagtggcctgggctgagaggtttgtggcagtggaagtgcaacgttgctagaggtggactcaccaggctgtttctgaggtcgaggcacatgcatgcacatggtggattgaccaacttggtgccaggctcactagggttggggacatggggctgtttctcaggcccaggatgcaaacacaagtctctttggctggcctgggggtgtggcttctgagggcaatccacagggctgtttctcaggttcaggacacaagtgcatggccgctcaactggcctgggcatgtgtctcccagggccaccccatgggctctttctcagacccaggacatggccacatggcttcctcagctggcctgggtgtgtgtctgctggggggctgcaggggcacagggttatttctcaggccggggtcatgggcgcacagctgcttgctggcttataggagtgcctgccaggggtggcccatgatgctgtttctcaggcctaatttcaggtgcagagcctttgggcaggtcaacggcatacctgtggaaattggagtggatgccacagggctatttctcaggtgcctgagtgtgggcacatatccactctgccagcctggagttagtatcaggtgctcggtggctcaggggcctctcctgctcaggggagggccctcagcagcttggccaaatcaatggtggattcaccctgggcaggcctggcaggctcttcctccagctggatgtgcagcagcaggggttgggttttttgctgtgcagggccagagtcacggccaatcctcagcctaggctctgcacagccagggttgtggcattcagccacccagatatgggcatcctgaagatggagccccaatgctagaaaggggcagtggctaccagcctcagggcaggatgcactccagaggcggctccggtctcaaggtggcgctgggctgcagcagctaggctcacagtggatgaatgggggcagggagtacacaccttgtgctcctaatctgggatcattcctggcagctcccaaacttggctgagggcttgcaaaacctgtggaattctcctgttgcaagggctgtagatgtttgcagtggcagtgggtgctggcgggaaatctgcttaccttttccctacatgggaagtccctcctgtgtccagaccaatccgatctgggtggggaagacaaggctgcaaaggccaggtgcctccatgctgccctccgatcaccacgggtgcgtttccacacctccactgcactccgtcagtctcccttcaacactccagtcaaaccttagctgtttcttctttgccttattccttcctcatggggagggtgtgggtgaacaccaggcttctctaagttcttcatccatcttgctgatgtcattctccatccaggcatgggtttttaagaagtagtgaatactgaaatttcagcagaggacacctctataaaaattctgcaactggaaaacctccttaaattggctgattgtcattacaattggaggaaaactgccaataatttcaaatttagaaggctgagactctataaacaaagactaacaatatgttttctgatatttttccccaaaataatacttttccaagacgaaaatttttccagggtatataagcacatgtgctccaatgatacaacaaatacttactaatcataagcaaataccttaaatgtcttataacatctttcacacaaaagctgttgcatgtctattagctaaaaattcttatgtctcgtccagatcatgcagcatgagcaaagggatttttgaccttcaaaagtctcagtactaactgaggactttacacaaattggaaatggtcacctgcatttcatggtggtggtggggagcttttgcactggaaaatccttctgtagagaagattccattatcttggtaaaattacatagttttattttgcagattgggattaccaactgataaagggttactgatgtggaagttttcctactttattctcctattaggttcctatgtgatatggtttggctctgtgtccccaccccaatctcatctccaattgtaattcccatgtgtccagggagggtccaggtgggagtgattagatcaagggtggtttttcccaggctgttttcatgatagggtgttatcatgagatatgatggtttaaaagtggcaggttcccctgctctctctctcgcctgctgccacataagacgtgccttgctttcccttcaccttctgccatgattgtaagtttcctgaggcctccccagccatgcggaactatgagtcaattaaacctcctctctttataaattacccagtctcaggtagtatctttatagcggtgtgaaaatggactaatacactatggctttgaattaataatttaaaatttgtcagcttggcaataaaacatcctgttgacatttattttttaggtaatattttaaattggcagtttcattcatgtttttacaaattcttattttcagggtgtttaaggcctttgctttgaacttggtggttccttacactccatgctgttagtgaagagggaccaggttgggaggcattggtttgggtggtggtcaggaagggcagagtgatttgagtagggtctgagtggataatagctcatcagtttggaatttataaatgaccagggatgatttaaggagattcctgccagacacctatgccatggccatgccctatctggatctccagccgtgagatgagaacccagccatgcgggggagtctgttcgttctgctcaatgttgtaagtggcacatgctattggataatgtagaattgaatggatatcattttattattataatttacaaacttcctacaataaacttatcacctttatacatagaaacaaatataagtacattttccctcccctatgtcattttgagccctctctccaaaccatcctcccactctgcgactcactgtcctgcatttggctatgctctggcaagtcctgcttagacaagcactcaccagaccacctactcagcctcccttcagcgcccacctggcccacctgctcaaatacatgttgagtggtcacacacatggactgaacaccatctattccatgcactgccccagtgaccgcactgagcagcaagagagaaatgatcgcattagctatcaattatgccaattcaaatgctggagtctttctcagatacttttcaatgttcaagaattgttgattgtgaattctatacccaatgaaactatccttcagaaatgagcagaaaatggataccttctcaaataaacaaaaactaaaagaattcttgctacaagatgtactcttaaagactggctaaaggaagttcttcaaacagcaaggaaattgaattgatcttatgtcctgcacacttgctaaatttcctctcaattttagcagcactgtttagattccataggattttccatacaaacagtcatgtggtctatatatagagacagattttcctcttttccagtggggataaatttatgtctttttctttctgtgttacagcaggtaggacctccagtacaatgttaaacagaagtggtgaaaacagacattcttgcctgtttcctaacgttggagtttggtcttttactatggtgtcagatgttagctgtagggtttttataaatgcccttcatcacattgaggaagtttgctcctatgcctaattttctgagagtcttttaatgtgacactcatgctagaatttattaaatgctttctgtctactaagatgattatgcagttcttatattaacatgaataattacatttatttattctttaatatcaaggcaattttgcattcctgagacaaaccccatttagtcatcatgtgttgttattgttacatattgttggattcaatttcctcaaaatttgttaagaattgttacatctatgtttacaaggaagattagtctgtagggtattttttcttataataactttgcctagttttgcaatcagggtaatgctggactcacagaatgagttgggaagctatttcctcctcttcatttttctgaaagaatttgtataaaattggaattatatcttccttaaaggtttgcaagatttcataatgaagtcattggcctagagttttctttgtgggaaagtctttgtttgtttgttttgtggtttgggtttttttttaagagacacagtctcactctgttgcccaggctggaatgcagtggtgtaatcatagctcacagcagcctcaacctcctgggctcaagcaatcctcctacctcagccttcagagtagctgggactacgggcatgtaccaccacacccagctgtttgtttgtttgtttatcgctttgtcttgtttttgaggtcttattatgttgcccaggctggtcttgaactcctggcctcaagtaatcctcatgcctcagcctcccacagtgctggaattacaggcatgagccactgcacacagactgtgggaaagtttttaactaaaaattcaattttctcttccttttccagtgagctttccagtgtctttcaattaatgtatctattttatctaagttgttgaatttattgtcaaaatttttttaaacaatattcctctcttagaggttgaacatctgtagaatctgtagtgatggcacctcttaaatccctgatcttgctcatctgtgtcgtctctctttctctaatcagtatgcctaaagtttaatttcattgattttcttaaaaaactggttttggttttattgatttttttccctagttttttgtgttacatttcattgacttctgctctgatatttactatttcctttctactgcctacagtaagtttaatttgctattttcttagtttcctaaagtggaagctaagtttattgacttgaggcctttcctctgtctggatgcggatatttgctgctaaacatttccctccaacaccatgctgtgagttttagttacagcgggcttggagttggcctgagaaattctacttaaacagctgcacctatcatgtaagtgataaatgatgtacctgcctggccctcacccctggtcaaagaatgggatgtactaatgagcaatgttgctgcgtagctgtggatttcaaggtattttctgtgtggttttatcatcagcattgtttgttgatgactgcaagactgatgatttgcacctggcctcggtgagatccccgaaagaccctgcagatgggctggttacttagcagaaaatatgacaacgtggccagcaggaaacaggaaggtacaatcggctgcaggtgagctgttggaagtaagttccaattttcctattttgtatttgcattttaatagtgagactgcgcttatgttatttgtgtgaaacagctttattcatagcactgtaatttaaagagaaaacccattcatgggaacaacaaacgacctagacaccaaggtagctcatgccatccaaggctatactgtgcagtgattgggaaaatgggcactggtcccagaagtctgatcgacactctgccactggctagtcccgtgctggggggcgaggatccacactctgccactggttagtcccatgctggggacaagtatccacactctgccactggctagtcccgtgctggggggcgaggatccacactctgccactggttagtcccatgctggggacaagtatccacactctgccactggctagtcccgtgctggggggcaaggatccacactctgccactgattagtgttgtgaagatttaaataaagaacccacaccatattctttgacttgtgctttccgtatactgagagatagtaagagtacattattattatttataaagtaaactagaaagcacatgggaagacaagaagaaaacctgaataaacatgaattaccccattttcctcaggagaaaactttcacactctgaaggtacacaaattagcctacaaatttaatgtaaagcaaatagactgttgtaggtaccaattctcaatgtcacagtgttacatggaaagtaaaatacacaagaacagcccaaaagatggaaacaatggacgtggtcaaatgacatcagtacaacatccatatggtcctaagtagccatctttaaaatgggttagaaatgccttcaatcattcacacagacacatgcattgaacaaactctaagaagtgttcttacacgggaaaagcaagttacagatgcatgggcatgatatggatgtagatgtgtgtatgtgcatcccactcatacacaaaatacccagcatcgcccacatgcctgctgtgtgcgtaagtgtgagcgagtgcacagacaacagcgtgcagaaattcaaaccaagctgtgggtacttgttaccactgggaagggagtcggtcacagagggaaagagaaacaggacatcagcctttgacttcagaactgttcctgccttttcacatcctgtgctgttttcagcatcatcggagcccttaacacacatcacgggagtaagagtgtgttagagggagcattcggtgggacagatattgccatggcttgtggatagagttcacagtccttaataatccccgagatggcagccaagagctacgttctcaatcacgcagcttcaccccagaaactgacagaaacccaacaaccaaaaggtgtccattctgacagcctcagcctgtgctggctcagatgagcaaaaatgtacagatattaataatgatgttgatttgaagagcacagaggggggtatgcatgataagggtccaaatttttaccttaaaaaagaatacatttacttctcaatcacctacataacgatcattttttaaaaaactgatcaaatttggtgttacaagggcacgttgcaaattcttctggctacttttctctgactattctaattacgttaccgtgttttctcctgtatgtgcccgttcatgtgaatgtcatttctggctacttttctctgactattctaattacgttaccgtgttttctcctgtatgtgcccgttcatgtgaatgtcatttctggctacttttctctgactattctaattacattaccgtgttttcctgtatgtgcccgttcatgtgaatgtcatttctggctacttttctctgactattctaattacgttaccatggtttctcctatatgtgcccgttcatgtgaatgtcatttctggctacttttctctgactattctaattacgttaccgtgttttctcctgtatgtgcccgttcatgtgaatgtcatttctggctacttttctctgactattctaattacattaccgtgttttcctgtatgtgcccgttcatgtgaatgtcatccaggcagatttcccaaatccggcttcctgtaaccaagggctgaaagagggaacggtttcctgggaatcctttttgcagtttattttacccggaggcagaagcccacggttccgtgaagagtctattgctctcccctctctccttttgtgtctctatttttaattgacaaaaaagcaaatgtgaagattcctggggtacaatgcaaagtgacaatgcctgtctatattgtgggatgattaaaacaaggtaagtggcatatccatcacctcacacacttatcattttgtggtgagaacatttaaaatctcatcttttagcaattttgaaatagtcattattgttaactatagtcaccatgctgtgcaacagatcaaaagaactgactcctcccatcagcagaaacttcatgccctttgaccagcatctctcctttccccgtccacgactaacccccagcccaagagaacagccaacacccacctcgctgctgccacacgacatgtcgggctttgatgggatggaggtgagggtggggaagacaattccaaagctggagcactggcctcacagctcagacactcttctacttatcctgagagaatgatgtgctgagaccaactaaacctcccctgctcttcccacatggcagaaaagaggcaacccagggaagccattgccaggacatcatggtcacccaacccttgtgcagaaaggaagcacctgcccaggatgccatagcacccaaccctcatccccaaggaaacacagcccagggcaccatggacacccaaccgtcatccccaggggaggacacagcccagggcaccatggacacccaaccctcatccccaggggaggacacagcccagggtatcttggacacccagccctcattcctaggggagtacacagcccagggcatcttggacatccaaccctcatccccagggaaggacacagcccagggcatcttggacacccaaccctcattcccataagagcacacagcccagggcatcgtggaggcccgaccctcatccctaggggaggacacagcccagggcaccatggacacccaaccctcatccccaggggaagacacaacccaggccaccattaacacccaatcatgtgcagggagggtgtccttggagcctgggactcttgccagtgaagcggtggacaagaaactgaggatgcgatcagcacacagaaatctcaggcagcctaggatacatgaggcctctcacccctgggaacactgagcagccaccaggagcccacaccttgaggtacagcaggagccatgcgctcttgctcttgctcactcacactcctgcacacagccactgacacacgccctcgtgcacgttgcagattaactccactggccttgcacttgcaacgctggaggctgagaggtatccccaggttcttttctcgtgagaggggcaggctgactttcactctcctccatgtgctagaggcagctccaccaacactggctgccctgagtggatgcacctggctctggaattcctgtcatttgctttggatccaggagcccctgcctcatgtagctacttaacagaaaggaggaatccacccaggacatgcccagacgggagcctcacaggatggacagtggtgtctggggtcacgggcagccctgacccagcagcgccagcaccagcacacccagtggggaaggcggggaggcccaaacgccacccacagtttgttactccactgggtgggacccggcacccctgccttcctgacaccctggagtccctgcctcctcctagagcccccaagcccatctgcctcagagcatccagagacagacctggggagccatttcctcaggccctggacaaggaaacagggaattccaggttatgggtgcctggggcaggtctcaggcaggtgctgggaaccagagagaggggtcaccgcgaggcctcaggcctggcaccagcactttgagcctcagtttaccagcccacgaggtgctgagtctggactggatgaccttcccacccccagtgacctctgccctttcccgagcatgtcagctctgctccagcatcctggtgtgagcgcaatgccactttttttctcaacaaatacgaaaggaggaaggtgcccccagggccctgtgccctgaggatgcctgtgtggaggggtccatttcatcactggtgtcactcacaggaagggacgaagccacctgccttgacggagcttactccacctccgccgaaggccggggaggtccctcacagagaacctgaggcccagcaggctgcagaggtgctggcatggaatgactgctcagacgcccggggccggcagagaggacggatgtgggggaggtgcacactgaggagcctctccttggaggtggagacacgtgcaccacatggaccaggacacagtccacgaagcctcgcatccccctgagctgcagctcaagggcctctctctgagcccagagtcccacccctgggaggcagctgccccagctctgagggaggagggcatccaccaggccctccatctcctgggggcaccagcccagcccagaggctctgcaggactctgcacctccaattcatggccaggactttctggatgtatcttaaggactgaggactccacatcagggaccacacaagaccggggtcccggacacgggggttgggggtgagcatgtcaccgggatgggctgtggcgtcactctggtacttcatccggacagccagggaccaaagccacgccctcagccccaccccacccctgcctcacatggcaacgcagggtctgcagatgcaggagagtgagaagcatggtagccaggcagactagaggacccgagctggggttgagcacctccctgtctacccagggcatggcctgtgagactgcaggtggcctagtgtgtgctgcaggctcaaggtcctgccccagggagcatgacattcaggcccagaaattgcatcgtgctgcacacagtccaaggggataaccctgtgaagttcaggtcaccagcaggcttggggtcaagaccgagctgcagaggacaggtttctggaaggcacagcatcatgggtggagggacttggagcaaggtccttagccccgggaccagtgaatgtgtgcccttatagggaaagggggtctgtgcagaagcaagttagctgaaaatcatgaagtggagaggctcccctggattaaaggggtgagccctaatgtaatcacaagtgtccttctaggaggttggcagagggagactgacatagacagaagccaggtgaggtgggaagcggaggcagaggccgagagagcagacgctacgccctggccctgaagacggaggaggagccgagagctcagggatggagagactggaggaggcagggaagttctccccgcaagcctggagggagcatggcctccagcacccccagaccttggccctgcaggattcatctggacctgtggtataaatggtgtttaagccactgggctgtgcaaattgtcatagcagccatggcgcattcctagagggagccctggtggggacccagcaggcagcgacggggccctcacaagcctgtgagccactcagagccgcgagagtggctaggcttggtgaggtgcaggccacgcgcacctccactaaggcagccttagggcccacacatcctctctctctctctctctctctctctctatctctctccctccctccttccctccctcccgctctcttggttggacagctctccatcatccccctggacacgaccacctcccaaggccgagctggggcgctttgctcgaggtgagcactgacatcctgggggtgtgaggggcacctgcccagcggccccgtgtgcaggatgggcggtgggccctagctggcactgggcatatggcccggctggtgcctgcaggctgcagcttttctggggtggctgggatcagtgaaggcctccagagtctgggcctgggatccctgcagtgctggctgaggacaggcggggctgggcagtgagggcactgggtcactatcaccacccacggtttattacttcactaggtgggacctggcacccctgccttcctgacaccctggaatccctgcctcctcctacagcccccaagcccatctccctcagagcctccagagacagacctggggaggcatttcttctgcccccagcagaagcccgggaggccgggaaggcacagtgggtctaaaggagaggatcccaggactgcctgaggggtgactccgacgaggcaagcatagagcccactgagaagcggggtgggagccccaccagggatgggctagttcctcatgaaggaccaggacccaggaaggacaagggggcctgctggggcagggtctgctatgccggagtccctgtgagcctggcccagacctgcctctctctttcctcattggtccccacaggtccgtggtggttgccgtatcgggaggccccatggtggcaggggtgggacacctggtatacgtcgccaggtgtgtccaataggctcatgctcacaccttctcctggcacctgggcaaagcctgagcacccaggcactgaagtgagggcaaggcctcggggccccacaggatggccgaggagacagctgcagggcgcctgggacccctgggctcaggaggtagaaggatacagcctgaaaacccacaccacaagctcaccggccagtgcaggcccacagagctcgaggaggcagccctgagcctcccagggagagatgctctgtgcacgccggcacaggccctgggttacaaaccctaggcacagcccaggagaggcccaggccccagtccagcaaggggttgcaggaagcaagaggtccccggccacagcatgagataagcccatcaagccagggccaggtgggcaatgggaggcaggcagggcttgggggtgagtccctgctgcagcgccgtccactgtcgaccggaggagtttcttccctgtgcggagtccacgggcctcctgtgagtgtgtgcatgggcacaagtgtgtgtgtggctctgctgtgtgtctgtacacacgtatgttttgggtttttttgtgtctcagaccacagagtctgcccctcccaccaaagcccaggcagaaggatgaacccacgcccctggggcccaggcctcagcagcctctgcaggatcattgttcccagttgtcacttgcctttgccacagccctatttctccacaattccttaaagtcctcaacatgcatttaaggcacaaaggtgaaactgcccagaaacatctgactccgccgtggaacccaggagcaagctgggttagctaaggagcggggccgttggcagaggctggggatccaggctgaactttggaggaggcatgtgccagcatgggctcctgactatgtcctcctgggacaaacccaaacccactctttgaatatgggagggactttgctggccccggccctgaccgcagcacttggaaactgaggagtggtcgcctcctccgtgtcacagctgcccgttcaccatcatagaagcaactctgtcacctccatgggcccctctgtggctgctgcctgggtccaagctgagcccagctgcccaggcccagaaggaaagcccaggccaggtgcccagcacagaggcagtcacataccccggggagagccacagcaagcagccaatgttgcccaggagaggagtagctgacaaggtagaacgtgagctgccatcggctcgagaggctttgctggtcctcctggggctctggacatgaccaggaggagcgagggaagaagtcgcatggtggtcccatcctgggtggggcctgatggcagctggccacccgtcccagagtggcagccagatgccagcgccattcccacagtcacatcattggtcacagaatgcaggacatagagtgtcttctttccatcacagtgctgtccagacccatagcctagggtagacctggaagattcaatgtccacacccggggctggagcgtagccatgagccacgccccctgcccgtgcatggaaagccagcccaagctctgctccatccctagccaaagtcagtgtcctttccccttctcccaagtgagctctagccacctgcctaccctgccatctgaggatgacagccttcattccattggaacctggctctgccaccagcaggcttgcagtcctgggcagactccgtcacctctctatgcctcagcctttccatctgcacaggaggaagatgatgatggtggtgatgatgatggcgatggtttccttttgcatctgaggcaaggactaattgagatgatacacatcaggcactgggtatggtgctggtccttcctgagcactcaatctatgtgagctgtccttgtgaaatgggtgtcaccacatttccccacgcagaacatcctttgtctgccatacttgaaacatctgccccaatattaacagttccttcatggaagatgtgcacacccacccaccctcatactcccaaaggtgcccgtgctttatcaagccaaagtccagccaggaactttacagcagcatccctttccctctccaagcaccaaggagcaaggcaaagcactacatcttccatctggaggcaatgccaccctcttctcccattttcactgccatccctaagaggcagtgcttccccaaaaggttccatagcagcctgcctacagcaactctgttcacacgagtttcagcatccttgcagtggctcccctgccatgctgtggctcttcattcaccctcttctcctgctccccgtgacaggcatagattctgagtgatctggatacattgctttgtttaataacattacagcttctgtgctgaaaaagatacagcagatagagaaggcaattgttgaacacaaaatagtgacagcagagatgacggcaagttggcatttttcttttctagcaataaaacttaaagctgactcaaggagaaatggaaatcataattggaacagtaatcctcaagaaagcattaagattattaaataattgccctcacagatgacttcaggccaagatggctttatgggtgaagtttagactttcacaaaactaatcagttcccataagaactgctccaggatttggaggaacatgggaaagtctattaaagggatcacaattcacagtccccagagtaaaacatgggctaacttgcattttggcaaagagccaaatgttataaatgacatcctagaaggccaaattctgtccatctcgttgaacaaggacttacaccaggaatttagaactatttatagctcatcccaccactcaggccaatgatgacccatgatcatctcaccagaaatggaaagactcagatgattaatagagtctcaatttctctgagacatctaagagcccagcccaagcccagacccaggagggcacccaggcctggacagagaacactgatatcacaccagccctccagagggaagcagagactccttcaagctctggaaacacaggcccagacagctgcctaaagttgggcaggcttcactgcaaacccaaatcatgaagctaggtaacacctttacagattctttacatttaaaaatcatcaaaacaagagtaaataataaactcaaataatattaatctaatatgtaaaggtcttgtaccattattatgcaaacaacatacataagctaataagaaaaagaacaaatcccttaagaaatcggcaaaaaggatataacacaatttctaaaagaaaacaaatggctagcacacataaggaaaacactttgtgaacagacattcttcagaacattatttataattataaaatagttgaaagcaagatagtgcctgaagaaattatggtgcatacattagtgggactattctgcaaacattcccaattatacttgtcacatatctgtgataacgtgacagccagcattcatggggtgacctcatttggtaaaagggtgcaaagctcaacacgcattgtgagatgactgtggtgtaaaattagtgggattattccgcaaacattcccaattatacttaccgcatatctgtgataacatgacagcattcatggggtgacctcatttggtaaaagggtgcaaagctcaacacgcattgtgagatgactggtgtaaatacaaagaccaaactgtgaaaaggagtccatcaattaatcgatgcttaccttcagttttgggctaatttttaaagtatgctataagcatatgctcctgttataacagaatggagggattatgagagatgatgcaggtgtgtcctgggcctcccctggcccactgggccctagagatgccttcccaggcatcgctgtcagggcttccctcagagggagtcctgtattgacctcaccaccaaggtctggagcaggggatccttagatattggttggggttatctcaccttaggtctgaatttggggttgtcttagactgttttgtgctgttagaatagaatacccaagactgggaaatttatactgaacggaaatttatttctcacagttctagaggctgtgaagtccaagagcacaggtgccagagcaagtccaagagcaagggaaagtccaaagcaagtccaggagcatctggcgaggaccttcttgctgtgtcatcacatggcggaaggcaagaaagagagcaagagggggccgaactcacccttttataacagcaccaatcccacccatgaggtggggaccttatgacctaatcactcttcatactgttacaatggcaatgaaatttcaacatgagttttggaggagagaagcattcaaaccacagcaagggtgctcctacctcctctctcagggcatctgcagaaagagctgcaactgcacgtccttcctccgtccatcctccatcccttcccaatgtccgtgcatatcctgtgacccaggaggtctggcatagggggtgctcctgccttaggtctgaggccctgtctgaagaggggtaggtgaggaggccatctgatggtctgggccaagacagtcacaggacgcatcatttatcatcaaggaggctgagggttgagtctccaggtccagggaactccccacaaagtgggaaccctgcccagctccacacagcctctgctgggggaccctgctctggtgcagagcctggggacaggtcttgagctcagccagagtctgcctccctgtcatttaggaactaaaccaagcggcaggatgctggagcccagcccccatctgaccttacagggccaaggctggggccctgggttcccctcaaggcgcagcaggactggagccccaggcagtgcaggagtggccaaagctggggcttcctccagagcccccaagcatcacggcaccaagaagggtaggaccctggcctgaggaattggcaccaaagccccagaaactaccctggacaccatggagagaggcctggaggggaagcaccaggcactgcctccccttctgatcccacctgaggtggctgccaagcccagagagccgctctgatgtcccccagccctgcagcccagggatacctgtactgtgcccctgggggacccctggccagtctgtgcaaagaagtcaccaccctacactcagagacagtgggggtcctcgtcccacatcctcagagcatggcccggctgctgcagggatggtctcctggtcctcagagcatggcccggctgctgcagggatggtctcctggtcctcagagcatggcccagctgctgcagggatggtctcctggaggccccccagtgctctattgtcagggctccctccaccccccgcaccaagagagagccagaccccagcaaggcttccagtggcttcaggtcacacccctaggctgaccccagccccattaacacctgcctgagaaagctccacgcaccagaactgaccgtctgctccaactcttgacctcccgttctcagggcgtctgctgaaaaggctgcaactgcacatccttcctccgtccgttcccgatgtccgtgtgtctcctgtggccaggaaggtctttctcgggacctgagagccgctccctgaagtgtccccattgggaaggatggggcctgtgtctccaggctctgggaggacagaatcctgacctcaacagtggccggcacggacacaactggccccatcccggggacgctgaccagcgctgggcaacttttcccttccccgacgactgagccccgagcaccctccctgctcccctaccacctccctttacaaggctgtggcctctgcacagatgataatggagcttggctcattcccctagagtcggtagggagttaaggacaaaactcagtttcctccacctgaactcaagtctgcctatgtttacctaatcacacctggtggacagtttggacaaacttgcacactcagagacacagacacttctagaaatcattatctccctgccccggggaccccactccagcagaagtctgctaggcactggcctgggccctcctgctgtcctaggaggctgctgacctcctgcctggctcctgtccccaggtccagagtcagagcagactccagggacgctgcaggctaggaagccgccccctccaggcgagggtctagtgcaggtgcccaggacaagaaagattgtgaatgcaggaatgactgggccacacccctcccgtgcacgccccctcctgccctgcaccccacagcccagccccccgtgctggatgcccccccacagcagaggtgctgttctgtgatcccctgggaaagacgccctcaacctccaccctgtcccacggcccaaggaagacaagacacaggccctctcctcacagtctccccacctggctcctgctgggaccctcaaggtgtgaacagggaggatggttgtctgggtggcccctaggagcccagatcttcactccacagaccccaacccaagcacccccttctgcagggcccagctcatccccctcctcctccctctgctctcctctcgtcgcctctacgggaaatccgggactcagcagtaaccctcaggaagcagggcccaggcgccgtttaataggaggcttcctcacaatgaaacttttagaaagccttgactacaatgatgaccttggtgtggctgtgaacactgtcagctcccacagctgctgcagcaaaaaatgtccatagacagggtgggggcccggggtcgtctgctgtcctgctcagcccacagcacgcatggaggatctgaggtgccacacctgacgcccaggccagaacatgcctccctccagggtgacctgccatgtcctgcattgctggagggacaggggcagcctatgaggatctggggccaggagatgaatcctattaacccagaggaaaactaacaggacccaagcaccctccccgttgaagctgacctgcccagaggggcctgggcccaccccacacaccggggcggaatgtgtacaggccccggtctctgtgggtgttccgctaactggggctcccagtgctcaccccacaactaaagcgagccccagcctccagagcccccgaaggagatgccgcccacaagcccagcccccatccaggaggccccagagctcagggcgccggggcagattctgaacagccccgagtcacggtgggtacaactggaacgaccaccgtgagaaaaactgtgtccaaaactctctcctggcccctgctggaggccgcgccagagaggggagcagccgccccgaacctaggtcctgctcagctcacacgacccccagcagccagagcacagtggagtccccactgaaccccactgaatggtgaggacggggaccagggctccagggggtcatggaaggggctggaccccatcctactgctatggtcccagtgctcctggccagaactgaccctaccaccgacaagagtccctcagggaaacgggggtcactggcacctcccagcatcaaccccaggcagcacaggcataaaccccacatccagagccgactccaggagcagagacaccccagtaccctgggggacaccgaccctgatgactccccactggaatccaccccagagtccaccaggaccaaagaccccgccccggtctctgtccctcactcaggacctgctgcggggcgggccatgagaccagactcgggcttagggaacaccactgtggccccaacctcgaccaggccacaggcccttccttcctgccctgcggcagcacagactttggggtctgtgcagagaggaatcacagaggccccaggctgaggtggtgggggtggaagacccccaggaggtggcccacttcccttcctcccagctggaacccaccatgaccttcttaagataggggtgtcatccgaggcaggtcctccatggagctcccttcaggctcctccctggtcctcactaggcctcagtcccggctgtgggaatgcagccaccacaggcacaccaggcagcccagacccagccagcctgcagtgcccaagcccacattctggagcagagcaggctgtgtctgggagagtctgggctccccaccgcccccggcacaccccacccacccctgtccaggccctatgcaggagggtcagagccccccatggggtatggacttagggtctcactcacgcggctcccctcctgggtgaaggggtctcatgcccagatccccacagcagagctggtcaaaggtggaggcagtggccccagggccaccctgacctggaccctcaggctcctctagccctggctgccctgctgtccctgggaggcctggactccaccagaccacaggtccagggcaccgcccataggtgctgcccacactcagttcacaggaagaagataagctccagacccccaagactgggacctgccttcctgccaccgcttgtagctccagacctccgtgcctcccccgaccacttacacacgggccagggagctgttccacaaagatcaaccccaaaccgggaccgcctggcactcgggccgctgccacttccctctccatttgctcccagcacctctgtgctccctccctcctccctccttcaggggaacagcctgtgcagcccctccctgcaccccacaccctggggaggcccaaccctgcctccagccctttctcccccgctgctcttcctgcccatccagacaaccctggggtcccatccctgcagcctacaccctggtctccacccagacccctgtctctccctccagacacccctcccaggccaaccctgcacatgcaggccctccccttttctgctgccagagcctcagtttctaccctctgtgcctaccccctgcctcctcctgcccacaactcgagctcttcctctcctggggcccctgagccatggcactgaccgtgcactcccacccccacactgcccatgccctcaccttcctcctggacactctgaccctgctcccctcttggacccagccctggtatttccaggacaaaggctcacccaagtcttccccatgcaggcccttgccctcactgcccggttacacggcagcctcctgtgcacagaagcagggagctcagcccttccacaggcagaaggcactgaaagaaatcggcctccagcaccctgatgcacgtccgcctgtgtctctcactgcccgcacctgcagggaggctcggcactccctgtaaagacgagggatccaggcagcaacatcatgggagaatgcagggctcccagacagcccagccctctcgcaggcctctcctgggaagagacctgcagccaccactgaacagccacggagcccgctggatagtaactgagtcagtgaccgacctggagggcaggggagcagtgaaccggagcccagaccatagggacagagaccagccgctgacatcccgagcccctcactggcggccccagaacaccgcgtggaaacagaacagacccacattcccacctggaacagggcagacactgctgagcccccagcaccagccctgagaaacaccaggcaacggcatcagagggggctcctgagaaagaaaggaggggaggtctccttcaccagcaagtacttcccttgaccaaaaacagggtccacgcaactcccccaggacaaaggaggagccccctgtacagcactgggctcagagtcctctccaacacaccctgagtttcagacaaaaaccccctggaaatcatagtatcagcaggagaactagccagagacagcaagaggggactcagtgactcccgcggggacaggaggattttgtgggggctcgtgtcactgtgaggatattgtagtagtaccagctgctatgcccacagtgacacagccccattcccaaagccctgctgtaaacgcttccacttctggagctgaggggctggggggagcgtctgggaagtagggcctaggggtggccatcaatgcccaaaacgcaccagactcccccccagacatcaccccactggccagtgagcagagtaaacagaaaatgagaagcagctgggaagcttgcacaggccccaaggaaagagctttggcgggtgtgcaagaggggatgcgggcagagcctgagcagggccttttgctgtttctgctttcctgtgcagatagttccataaactggtgttcaagatcgatggctgggagtgagcccaggaggacagtgtgggaagggcacagggaaggagaagcagccgctatcctacactgtcatctttcaagagtttgccctgtgcccacaatgctgcatcatgggatgcttaacagctgatgtagacacagctaaagagagaatcagtgaaatggatttgcagcacagatctgaataaattctccagaatgtggagccacacagaagcaagcacaaggaaagtgcctgatgcaagggcaaagtacagtgtgtaccttcaggctgggcacagacactctgaaaagccttggcaggaactccctgcaacaaagcagagccctgcaggcaatgccagctccagagccctccctgagagcctcatgggcaaagatgtgcagaacatatgtttgtcatagccccaaactgagaatgaagcaaacagccatctgaaggaaaacaggcaaataaacgatggcaggttcatgaaatgcaaacccagacagccagaaggacaacagtgagggttacaggtgactctgtggttgagttcatgacaatgctgagtaattggagtaacaaaggaaagtccaaaaaatactttcaatgtgatttcttctaaataaaatttacagccggcaaaatgaactatcttcttaagggataaactttccactaggaaaactataaggaaaatcaagaaaaggatgatcacataaacacagtggtcgttacttctactggggaaggaagagggtatgaactgagacacacagggttggcaagtctcctaacaagaagagaacaaatacattacagtaccttgaaaacagcagttaaaattctaaattgcaagaagaggaaaatgcacacagctgtgtttagaaaattctcagtccagcactgttcataatagcaaagacattaacccaggttggataaataaacgatgacacaggcaattgcacaatgatacagacatacattcagtatatgagacattgatgatgtatccccaaagaaatgactttaaagagaaaaggcctgatatgtggtggcactcacctccctgggcatccccggacaggctgcaggcacactgtgtggcagggcaggctggtacctgctggcagctcctggggcctgatgtggagcaggcacagagccgtatccccccgaggacatatacccccaaggacggcacagttggtacattccggagacaagcaactcagccacactcccaggccagagcccgagagggacgcccatgcacagggaggcagagcccagctcctccacagccagcagcacctgtgcaggggccgccatctggcaggcacagagcatgggctgggaggaggggcagggacaccaggcagggttggcaccaactgaaaattacagaagtctcatacatctacctcagccttgcctgacctgggcctcacctgacctggacctcacctggcctggacctcacctggcctagacctcacctctgggcttcacctgagctcggcctcacctgacttggaccttgcctgtcctgagctcacatgatctgggcctcacctgacctgggtttcacctgacctgggcttcacctgacctgggcctcatctgacctgggcctcactggcctggacctcacctggcctgggcttcacctggcctcaggcctcatctgcacctgctccaggtcttgctggaacctcagtagcactgaggctgcaggggctcatccagggttgcagaatgactctagaacctcccacatctcagctttctgggtggaggcacctggtggcccagggaatataaaaagcctgaatgatgcctgcgtgatttgggggcaatttataaacccaaaaggacatggccatgcagcgggtagggacaatacagacagatatcagcctgaaatggagcctcagggcacaggtgggcacggacactgtccacctaagccaggggcagacccgagtgtccccgcagtagacctgagagcgctgggcccacagcctcccctcggtgccctgctacctcctcaggtcagccctggacatcccgggtttccccaggcctggcggtaggtttggggtgaggtctgtgtcactgtggtattacgatttttggagtggttattatacccacagtgtcacagagtccatcaaaaacccatccctgggaacctgctgccacagccctccctgtggggcaccgccgcgtgccatgttaggattttgactgaggacacagcaccatgggtatggtggctaccgcagcagtgcagcctgtgacccaaacacacagggcagcaggcacaacagacaagcccacaagtgaccaccctgagctcctgcctgccagccctggagaccatgaaacagatggccaggattatcccataggtcagccagacctcagtccaacaggtctgcatcgctgctgccctccaataccagtccggatggggacagggccggcccacattaccatttgctgccatccggccaacagtcccagaagcccctccctcaaggctgggccacatgtgtggaccctgagagccccccatgtctgagtaggggcaccaggaaggtggggctggccctgtgcactgtcactgcccctgtggtccctggcctgcctggccctgacacctgggcctctcctgggtcatttccaagacagaagacattcccaggacagctggagctgggagtccatcatcctgcctggccatcctgagtcctgcgcctttccaaacctcacccgggaagccaacagaggaatcacctcccacaggcagagacaaagaccttccagaaatctctgtctctctccccagtgggcaccctcttccagggcagtcctcagtgatatcacagtgggaacccacatctggatcgggactgcccccagaacacaagatggcccacagggacagccccacagcccagcccttcccagacccctaaaaggcgtcccaccccctgcatctgccccagggctcaaactccaggaggactgactcctgcacaccctcctgccagacatcacctcagcccctcctggaagggacaggagcgcgcaagggtgagtcagaccctcctgccctcgatggcaggcggagaagattcagaaaggtctgagatccccaggacgcagcaccactgtcaatgggggccccagacgcctggaccagggcctgcgtgggaaaggcctctgggcacactcaggggctttttgtgaagggtcctcctactgtgtgactacagtaactaccacagtgatgaacccagcagcaaaaactgaccggactcccaaggtttatgcacacttctccgctcagagctctccaggatcagaagagccgggcccaagggtttctgcccagaccctcggcctctagggacatcttggccatgacagcccatgggctggtgccccacacatcgtctgccttcaaacaagggcttcagagggctctgaggtgacctcactgatgaccacaggtgccctggccccttccccgccagctgcaccagaccccgtcctgacagatgccccgattccaacagccaattcctggggccaggaatcgctgtagacaccagcctccttccaacacctcttgccaattgcctggattcccatcccggttggaatcaagaggacagcatcccccaggctcccaacaggcaggactcccacaccctcctctgagaggccgctgtgttccgtagggccaggctgcagacagtccccctcacctgccactagacaaatgcctgctgtagatgtccccacctggaaaagaccactcatggagcccccagccccaggtacagccatagagagagtctctgaggcccctaagaagtagccatgcccagttctgccgggaccctcggccaggctgacaggagtggacgctggagctgggcccacactgggccacataggagctcaccagtgagggcaggagagcacatgccggggagcacccagcctcctgctgaccagaggcccgtcccagagcccaggaggctgcagaggcctctccagggggacactgtgcatgtctggtccctgagcagccccccatgtccccagtcctgggggcccctggcacagctgtctggaccctctctattccctgggaagctcctcctgacagccccgcctccagttccaggtgtggttattgtcagggggtgtcagactgtggtggatacagctatggttaccacagtggtgctgcccatagcagcaaccaggccaagtagacaggcccctgctgtgcagccccaggcctccagctcacctgcttctcctggggctctcaaggctgctgttttctgcactctcccctctgtggggagggttccctcagtgggagatctgttctcaacatcccagggcctcattcctgcaaggaaggccaatggatgggcaacctcacatgccgcggctaagatagggtgggcagcctggcggggacaggacatcctgctggggtatctgtcactgtgcctagtggggcactggctcccaaacaacgcagtcctcgccaaaatccccacggcctcccccgctaggggctggcctgatctcctgcagtcctaggaggctgctgacctccagaatggctccgtccccagttccagggcgagagcagatcccaggccggctgcagactgggaggccaccccctccttcccagggttcactgcaggtgaccagggcaggaaatggcctgaacacagggataaccgggccatcccccaacagagtccaccccctcctgctctgtaccccgcacccccaaggccagcccatgacatccgacaaccccacaccagagtcactgcccggtgctgccctagggaggacccctcagcccccaccctgtctagaggactggggaggacaggacacgccctctccttatggttcccccacctggctctggctgggacccttggggtgtggacagaaaggacgcttgcctgattggcccccaggagcccagaacttctctccagggaccccagcccgagcacccccttacccaggacccagccctgcccctcctcccatctgctctcctctcatcaccccatgggaatccagaatccccaggaagccatcaggaagggctgagggaggaagtggggccactgcaccaccaggcaggaggctccgtctttgtgaacccagggaggtgccagcctcctagagggtatggtccaccctgcctatggctcccacagtggcaggctgcagggaaggaccagggacggtgtgggggagggctcagggccccgcgggtgctccatcttggatgagcccatctctctcacccacggactcacccacctcctctccaccctggccacacgtcgtccacaccatcctaagtcccacctacaccagagccggcacagccagtgcagacagaggctggggtgcaggggggccgccagggcagctttggggagggaaggatggaggaaggggagttcagtgaagaggcccccctcccctgggtccaggatcctcctctgggacccccggatcccatcccctccaggctctgggaggagaagcaggatgggagaatctgtgcgggaccctctcacagtggaatacctccacagcggctcaggcaagacccaaaagcccctcagtgagccctccactgcagtcctgggcctgggtagcagcccctcccacagaggatgaacccagcaccccgaggatgtcctgccagggggagctcagagccatgaaggagcaggatatgggacccccgatacaggcacagacctcagctccattcaggactgccacgtcctgccctgggaggaacccctttctctagtccctgcaggccaggaggcagctgactcctgacttggacgcctattccagacaccagacagaggggcaggccccccagaaccagggatgaggacgccccgtcaaggccagaaaagaccaagttgtgctgagcccagcaagggaaggtccccaaacaaaccaggaagtttctgaaggtgtctgtgtcacagtggagtatagcagctcgtcccacagtgacactcgccaggccagaaaccccatcccaagtcagcggaatgcagagagagcagggaggacatgtttaggatctgaggccgcacctgacacccaggccagcagacgtctcctgtccatggcaccctgccatgtcctgcatttctggaagaacaagggcaggctgaagggggtccaggaccaggagatgggtcccctctacccagagaaggagccaggcaggacacaagccccctccccattgaggctgacctgcccagagggtcctgggcccaccccacacaccggggcggaatgtgtgcaggcctcggtctctgtgggtgttccgctagctggggctcacagtgctcaccccacacctaaaacgagccacagcctcagagcccctgaaggagaccccgcccacaagcccagcccccacccaggaggccccagagcacagggcgccccgtcggattctgaacagccccgagtcacagtgggtataactggaactaccactgtgagaaaagcttcgtccaaaacggtctcctggccacagtcggaggccccgccagagaggggagcagccaccccaaacccatgttctgccggctcccatgaccccgtgcacctggagccccacagtgtccccactggatgggaggacaagggccgggggctccggcgggtcggggcaggggcttgatggcttccttctgccgtggctccagtgcccctggctggagttgacccttctgacaagtgtcctcagagagtcagggatcagtggcacctccctaacatcaaccccacgcagcgcaggcacaaaccccacatccagggccaactccaggaacagagacaccccaataccctgggggaccccaaccctgatgactcccgtcccatctctgtccctcacttggggcctgctgcggggcgagcacctgggagcaaactcaggattaggggacaccactgtgggcctgacctcgagcaggccacagacccttccctcctgccctggtgcagcacagactttggggtctgggcagggaggaacttctggcaggtcaccaagcacagagcccccaggctgaggtggccccagggggaaccccagcaggtggcccactacccttcctcccagctggaccccatgtcttccccaagataggggtgccatccaaggcaggtcctccatggagcccccttcaggctcctctccagaccccactgggcctcagtccccactctaggaatgcagccaccacgggcacaccaggcagcccaggcccagccaccctgcagtgcccaagcccacaccctggaggagagcagggtgcgtctgggaggggctgggctccccacccccacccccacctgcacaccccacccacccttgcccgggccccctgcaggagggtcagagcccccatgggatatggacttagggtctcactcacgcacctcccctcctgggagaaggggtctcatgcccagatccccccagcagcgctggtcacaggtagaggcagtggccccagggccaccctgacctggcccctcaggctcctctagccctggctgccctgctgtccctgggaggcctgggctccaccagaccacaggtctagggcaccgcccacactggggccgcccacacacagctcacaggaagaagataagctccagacccccaggcccgggacctgccttgctgctacgacttcctgccccagacctcgttgccctcccccgtccacttacacacaggccaggaagctgttcccacacagaccaaccccagacggggaccacctggcactcaggtcactgccatttccttctccattcacttccaatgcctctgtgcttcctccctcctccttccttcgggggagcaccctgtgcagctcctccctgcagtccacaccctggggagacccgaccctgcagcccacaccctggggagacctgaccctcctccagccctttctcccccgctgctcttgccacccaccaagacagccctggggtcctgtccctacagcccccacccagttctctacctagacccgtcttcctccctctaaacacctctcccaggccaaccctacacctgcaggccctcccctccactgccaaagaccctcagtttctcctgcctgtgcccacccccgtgctcctcctgcccacagctcgagctcttcctctcctagggcccctgagggatggcattgaccgtgccctcgcacccacacactgcccatgccctcacattcctcctggccactccagccccactcccctctcaggcctggctctggtatttctgggacaaagccttacccaagtctttcccatgcaggcctgggcccttaccctcactgcccggttacagggcagcctcctgtgcacagaagcagggagctcagcccttccacaggcagaaggcactgaaagaaatcggcctccagcgccttgacacacgtctgcctgtgtctctcactgcccgcacctgcagggaggctcggcactccctctaaagacgagggatccaggcagcagcatcacaggagaatgcagggctaccagacatcccagtcctctcacaggcctctcctgggaagagacctgaagacgcccagtcaacggagtctaacaccaaacctccctggaggccgatgggtagtaacggagtcattgccagacctggaggcaggggagcagtgagcccgagcccacaccatagggccagaggacagccactgacatcccaagccactcactggtggtcccacaacaccccatggaaagaggacagacccacagtcccacctggaccagggcagagactgctgagacccagcaccagaaccaaccaagaaacaccaggcaacagcatcagagggggctctggcagaacagaggaggggaggtctccttcaccagcaggcgcttcccttgaccgaagacaggatccatgcaactcccccaggacaaaggaggagccccttgttcagcactgggctcagagtcctctccaagacacccagagtttcagacaaaaaccccctggaatgcacagtctcagcaggagagccagccagagccagcaagatggggctcagtgacacccgcagggacaggaggattttgtgggggctcgtgtcactgtgaggatattgtactaatggtgtatgctatacccacagtgacacagccccattcccaaagccctactgcaaacgcattccacttctggggctgaggggctgggggagcgtctgggaaatagggctcaggggtgtccatcaatgcccaaaacgcaccagactcccctccatacatcacacccaccagccagcgagcagagtaaacagaaaatgagaagcaagctggggaagcttgcacaggccccaaggaaagagctttggcgggtgtgtaagaggggatgcgggcagagcctgagcagggccttttgctgtttctgctttcctgtgcagagagttccataaactggtgttcgagatcaatggctgggagtgagcccaggaggacagcgtgggaagagcacagggaaggaggagcagccgctatcctacactgtcatctttcgaaagtttgccttgtgcccacactgctgcatcatgggatgcttaacagctgatgtagacacagctaaagagagaatcagtgagatggatttgcagcacagatctgaataaattctccagaatgtggagcagcacagaagcaagcacacagaaagtgcctgatgcaaggacaaagttcagtgggcaccttcaggcattgctgctgggcacagacactctgaaaagccctggcaggaactccctgtgacaaagcagaaccctcaggcaatgccagccccagagccctccctgagagcctcatgggcaaagatgtgcacaacaggtgtttctcatagccccaaactgagagcaaagcaaacgtccatctgaaggagaacaggcaaataaacgatggcaggttcatgaaatgcaaacccagacagccacaagcacaaaagtacagggttataagcgactctggttgagttcatgacaatgctgagtaattggagtaacaaagtaaactccaaaaaatactttcaatgtgatttcttctaaataaaatttacaccctgcaaaatgaactgtcttcttaagggatacatttcccagttagaaaaccataaagaaaaccaagaaaaggatgatcacataaacacagtggtggttacttctgctggggaaggaagagggtatgaactgagatacacagggtgggcaagtctcctaacaagaacagaacgaatacattacagtaccttgaaaacagcagttaaacttctaaattgcaagaagaggaaaatggacacagttgtgtttagaaaattctcagtccagcactgttcataatagcaaagacattaacccaggtcggataaataagcgatgacacaggcaattgcacaatgatacagacatatatttagtatatgagacatcgatgatgtatccccaaataaacgactttaaagagataaagggctgatgtgtggtggcattcacctccctgggatccccggacaggttgcaggctcactgtgcagcagggcaggcgggtacctgctggcagttcctggggcctgatgtggagcaagcgcagggccatatatcccggaggacggcacagtcagtgaattccagagagaagcaactcagccacactccccaggcagagcccgagagggacgcccacgcacagggaggcagagcccagcacctccgcagccagcaccacctgtgcacgggccaccaccttgcaggcacagagtgggtgctgagaggaggggcagggacaccaggcagggtgagcacccagagaaaactgcagacgcctcacacatccacctcagcctcccctgacctggacctcactggcctgggcctcacttaacctgggcttcacctgaccttggcctcacctgacttggacctcgcctgtcccaagctttacctgacctgggcctcaactcacctgaacgtctcctgacctgggtttaacctgtcctggaactcacctggccttggcttcccctgacctggacctcatctggcctgggcttcacctggcctgggcctcacctgacctggacctcatctggcctggacctcacctggcctggacttcacctggcctgggcttcacctgacctggacctcacctggcctcgggcctcacctgcacctgctccaggtcttgctggagcctgagtagcactgagggtgcagaagctcatccagggttggggaatgactctagaagtctcccacatctgacctttctgggtggaggcagctggtggccctgggaatataaaaatctccagaatgatgactctgtgatttgtgggcaacttatgaacccgaaaggacatggccatggggtgggtagggacatagggacagatgccagcctgaggtggagcctcaggacacaggtgggcacggacactatccacataagcgagggatagacccgagtgtccccacagcagacctgagagcgctgggcccacagcctcccctcagagccctgctgcctcctccggtcagccctggacatcccaggtttccccaggcctgccggtaggtttagaatgaggtctgtgtcactgtggtattacgatattttgactggttattataaccacagtgtcacagagtccatcaaaaacccatgcctggaagcttcccgccacagccctccccatggggccctgctgcctcctcaggtcagccccggacatcccgggtttccccaggctgggcggtaggtttggggtgaggtctgtgtcactgtggtattactatggttcggggagttattataaccacagtgtcacagagtccatcaaaaacccatccctgggagcctcccgccacagccctccctgcaggggaccggtacgtgccatgttaggattttgatcgaggagacagcaccatgggtatggtggctaccacagcagtgcagcctgtgacccaaacccgcagggcagcaggcacgatggacaggcccgtgactgaccacgctgggctccagcctgccagccctggagatcatgaaacagatggccaaggtcaccctacaggtcatccagatctggctccgaggggtctgcatcgctgctgccctcccaacgccagtccaaatgggacagggacggcctcacagcaccatctgctgccatcaggccagcgatcccagaagcccctccctcaaggctgggccacatgtgtggacactgagagccctcatgtctgagtaggggcaccaggagggaggggctggccctgtgcactgtccctgcccctgtggtccctggcctgcctggccctgacacctgagcctctcctgggtcatttccaagacagaagacattcctggggacagccggagctgggcgtcgctcatcctgcccggccgtcctgagtcctgctcatttccagacctcaccggggaagccaacagaggactcgcctcccacattcagagacaaagaaccttccagaaatccctgcctctctccccagtggacaccctcttccaggacagtcctcagtggcatcacagcggcctgagatccccaggacgcagcaccgctgtcaataggggccccaaatgcctggaccagggcctgcgtgggaaaggtctctggccacactcgggctttttgtgaagggccctcctgctgtgtgactacagtaactaccatagtgatgaacccagtggcaaaaactggctggaaacccaggggctgtgtgcacgcctcagcttggagctctccaggagcacaagagccgggcccaaggatttgtgcccagaccctcagcctctagggacacctgggccatctcagcctgggctggtgccctgcacaccatcttcctccaaataggggcttcagagggctctgaggtgacctcactcatgaccacaggtgacctggcccttccctgccagctataccagaccctgtcttgacagatgccccgattccaacagccaattcctgggaccctgaatagctgtagacaccagcctcattccagtacctcctgccaattgcctggattcccatcctggctggaatcaagaaggcagcatccgccaggctcccaacaggcaggactcccgcacaccctcctctgagaggccgctgtgttccgcagggccaggccctggacagttcccctcacctgccactagagaaacacctgccattgtcgtccccacctggaaaagaccactcgtggagcccccagccccaggtacagctgtagagagagtcctcgaggcccctaagaaggagccatgcccagttctgccgggaccctcggccaggccgacaggagtggacgctggagctgggcccacactgggccacataggagctcaccagtgagggcaggagagcacatgccggggagcacccagcctcctgctgaccagaggcctgccccagagcccaggaggctgcagaggcctctccagggagacactgtgcatgtctggtacctaagcagccccccacgtccccagtcctgggggcccctggctcagctgtctggaccctccctgttccctgggaagctcctcctgacagccccgcctccagttccaggtgtggttattgtcaggcgatgtcagactgtggtggatatagtggctacgattaccacagtggtgccgcccatagcagcaaccaggccaagtagacaggcccctgctgcgcagccccaggcatccacttcacctgcttctcctggggctctcaaggctgctgtctgtcctctggccctctgtggggagggttccctcagtgggaggtctgtgctccagggcagggatgattgagatagaaatcaaaggctggcagggaaaggcagcttcccgccctgagaggtgcaggcagcaccacggagccacggagtcacagagccacggagcccccattgtgggcatttgagagtgctgtgcccccggcaggcccagccctgatggggaagcctgtcccatcccacagcccgggtcccacgggcagcgggcacagaagctgccaggttgtcctctatgatcctcatccctccagcagcatcccctccacagtggggaaactgaggcttggagcaccacccggccccctggaaatgaggctgtgagcccagacagtgggcccagagcactgtgagtaccccggcagtacctggctgcagggatcagccagagatgccaaaccctgagtgaccagcctacaggaggatccggccccacccaggccactcgattaatgctcaaccccctgccctggagacctcttccagtaccaccagcagctcagcttctcagggcctcatccctgcaaggaaggtcaagggctgggcctgccagaaacacagcaccctccctagccctggctaagacagggtgggcagacggctgtggacgggacatattgctggggcatttctcactgtcacttctgggtggtagctctgacaaaaacgcagaccctgccaaaatccccactgcctcccgctaggggctggcctggaatcctgctgtcctaggaggctgctgacctccaggatggctccgtccccagttccagggcgagagcagatcccaggcaggctgtaggctgggaggccacccctgcccttgccggggttgaatgcaggtgcccaaggcaggaaatggcatgagcacagggatgaccgggacatgccccaccagagtgcgccccttcctgctctgcaccctgcaccccccaggccagcccacgacgtccaacaactgggcctgggtggcagccccacccagacaggacagacccagcaccctgaggaggtcctgccagggggagctaagagccatgaaggagcaagatatggggcccccgatacaggcacagatgtcagctccatccaggaccacccagcccacaccctgagaggaacgtctgtctccagcctctgcaggtcgggaggcagctgacccctgacttggacccctattccagacaccagacagaggcgcaggccccccagaaccagggttgagggacgccccgtcaaagccagacaaaaccaaggggtgttgagcccagcaagggaaggcccccaaacagaccaggaggtttctgaaggtgtctgtgtcacagtggggtatagcagcagctggtaccacagtgacactcacccagccagaaaccccattccaagtcagcggaagcagagagagcagggaggacacgtttaggatctgagactgcacctgacacccaggccagcagacgtctcccctccagggcaccccaccctgtcctgcatttctgcaagatcaggggcggcctgagggggggtctagggtgaggagatgggtcccctgtacaccaaggaggagttaggcaggtcccgagcactctccccattgaggctgacctgcccagagagtcctgggcccaccccacacaccggggcggaatgtgtgcaggcctcggtctctgtgggtgttccgctagctggggctcacagtgctcaccccacacctaaaatgagccacagcctccggagcccccgcaggagaccccgcccacaagcccagcccccacccaggaggccccagagctcagggcgccccgtcggattccgaacagccccgagtcacagcgggtataaccggaaccaccactgtcagaatagctacgtcaaaaactgtccagtggccactgccggaggccccgccagagagggcagcagccactctgatcccatgtcctgccggctcccatgacccccagcacgcggagccccacagtgtccccactggatgggaggacaagagctggggattccggcgggtcggggcaggggcttgatcgcatccttctgccgtggctccagtgcccctggctggagttgacccttctgacaagtgtcctcagagagacaggcatcaccggcgcctcccaacatcaaccccaggcagcacaggcacaaaccccacatccagagccaactccaggagcagagacaccccaataccctgggggaccccgaccctgatgacttcccactggaattcgccgtagagtccaccaggaccaaagaccctgcctctgcctctgtccctcactcaggacctgctgccgggcgaggccttgggagcagacttgggcttaggggacaccagtgtgaccccgaccttgaccaggacgcagacctttccttcctttcctggggcagcacagactttggggtctgggccaggaggaacttctggcaggtcgccaagcacagaggccacaggctgaggtggccctggaaagacctccaggaggtggccactccccttcctcccagctggaccccatgtcctccccaagataagggtgccatccaaggcaggtgctccttggagccccattcagactcctccctggaccccactgggcctcagtcccagctctggggatgaagccaccacaagcacaccaggcagcccaggcccagccaccctgcagtgcccaagcacacactctggagcagagcagggtgcctctgggaggggctgagctccccaccccacccccacctgcacaccccacccacccctgcccagcggctctgcaggagggtcagagccccacatggggtatggacttagggtctcactcacgtggctcccatcatgagtgaaggggcctcaagcccaggttcccacagcagcgcctgtcgcaagtggaggcagaggcccgagggccaccctgacctggtccctgaggttcctgcagcccaggctgccctgctgtccctgggaggcctgggctccaccagaccacaggtccagggcaccgggtgcaggagccacccacacacagctcacaggaagaagataagctccagacccccagggccagaacctgccttcctgctactgcttcctgccccagacctgggcgccctcccccgtccacttacacacaggccaggaagctgttcccacacagaacaaccccaaaccaggaccgcctggcactcaggtggctgccatttccttctccatttgctcccagcgcctctgtcctccctggttcctccttcgggggaacagcctgtgcagccagtccctgcagcccacaccctggggagacccaaccctgcctggggcccttccaaccctgctgctcttactgcccacccagaaaactctggggtcctgtccctgcagtccctaccctggtctccacccagacccctgtgtatcactccagacacccctcccaggccaaccctgcacctgcaggccctgtcctcttctgtcgctagagcctcagtttctcccccctgtgcccacaccctacctcctcctgcccacaactctaactcttcttctcctggagcccctgagccatggcattgaccctgccctcccaccacccacagcccatgccctcaccttcctcctggccactccgaccccgccccctctcaggccaagccctggtatttccaggacaaaggctcacccaagtctttcccaggcaggcctgggctcttgccctcacttcccggttacacgggagcctcctgtgcacagaagcagggagctcagcccttccacaggcagaaggcactgaaagaaatcggcctccagcaccttgacacacgtccgcccgtgtctctcactgcccgcacctgcagggaggctccgcactccctctaaagacaagggatccaggcagcagcatcacgggagaatgcagggctcccagacatcccagtcctctcacaggcctctcctgggaagagacctgcagccaccaccaaacagccacagaggctgctggatagtaactgagtcaatgaccgacctggagggcaggggagcagtgagccggagcccataccatagggacagagaccagccgctgacatcccgagctcctcaatggtggccccataacacacctaggaaacataacacacccacagccccacctggaacagggcagagactgctgagcccccagcaccagccccaagaaacaccaggcaacagtatcagagggggctcccgagaaagagaggaggggagatctccttcaccatcaaatgcttcccttgaccaaaaacagggtccacgcaactcccccaggacaaaggaggagccccctatacagcactgggctcagagtcctctctgagacaccctgagtttcagacaacaacccgctggaatgcacagtctcagcaggagaacagaccaaagccagcaaaagggacctcggtgacaccagtagggacaggaggattttgtgggggctcgtgtcactgtgaggatattgtagtggtggtagctgctactcccacagtgacacagacccattcccaaagccctactgcaaacacacccactcctggggctgaggggctgggggagcgtctgggaagtagggtccaggggtgtctatcaatgtccaaaatgcaccagactccccgccaaacaccaccccaccagccagcgagcagggtaaacagaaaatgagaggctctgggaagcttgcacaggccccaaggaaagagctttggcaggtgtgcaagaggggatgcaggcagagcctgagcagggccttttgctgtttctgctttcctgtgcagagagttccataaactggtgttcaagatcagtggctgggaatgagcccaggagggcagtctgtgggaagagcacagggaaggaggagcagccgctatcctacactgtcatctttcaaaagtttgccttgtgaccacactattgcatcatgggatgcttaagagctgatgtagacacagctaaagagagaatcagtgagatgaatttgcagcatagatctgaataaactctccagaatgtggagcagtacagaagcaaacacacagaaagtgcctgatgcaaggacaaagttcagtgggcaccttcaggcattgctgctgggcacagacactctgaaaagccctggcaggatctccctgcgacaaagcagaaccctcaggcaatgccagccccagagccctccctgagagcgtcatggggaaagatgtgcagaacagctgattatcatagactcaaactgagaacagagcaaacgtccatctgaagaacagtcaaataagcaatggtaggttcatgcaatgcaaacccagacagccaggggacaacagtagagggctacaggcggctttgcggttgagttcatgacaatgctgagtaattggagtaacagaggaaagcccaaaaaatacttttaatgtgatttcttctaaataaaatttacaccaggcaaaatgaactgtcttcttaagggataaactttcccctggaaaaactacaaggaaaattaagaaaacgatgatcacataaacacagttgtggttacttctactggggaaggaagagggtatgagctgagacacacagagtcggcaagtctccaagcaagcacagaacgaatacattacagtaccttgaatacagcagttaaacttctaaatcgcaagaagaggaaaatgcacacagctgtgtttagaaaattctcagtccagcactattcataatagcaaagacattaacccaggttggataaataaatgatgacacaggcaattgcacaatgatacagacatacatttagtacatgagacatcgatgatgtatccccaaagaaatgactttaaagagaaaaggcctgatgtgtggtggcactcacctccctgggatccccggacaggttgcaggcacactgtgtggcagggcaggctggtacatgctggcagctcctggggcctgatgtggagcaagcgcagggctgtatacccccaaggatggcacagtcagtgaattccagagagaagcagctcagccacactgcccaggcagagcccgagagggacgcccacgcacagggaggcagagcccagctcctccacagccaccaccacctgtgcacgggccaccaccttgcaggcacagagtgggtgctgagaggaggggcagggacaccaggcagggtgagcacccagagaaaactgcagaagcctcacacatccacctcagcctcccctgacctggacctcacctggtctggacctcacctggcctgggcctcacctgacctggacctcacctggcctgggcttcacctgacctggacctcacctggcctccggcctcacctgcacctgctccaggtcttgctggaacctgagtagcactgaggctgcagaagctcatccagggttggggaatgactctggaactctcccacatctgacctttctgggtggaggcatctggtggccctgggaatataaaaagccccagaatggtgcctgcgtgatttgggggcaatttatgaacccgaaaggacatggccatggggtgggtagggacatagggacagatgccagcctgaggtggagcctcaggacacagttggacgcggacactatccacataagcgagggacagacccgagtgttcctgcagtagacctgagagcgctgggcccacagcctcccctcggtgccctgctgcctcctcaggtcagccctggacatcccgggtttccccaggcctggcggtaggtttgaagtgaggtctgtgtcactgtggtattatgattacgtttgggggagttatcgttatacccacagcatcacacggtccatcagaaacccatgccacagccctccccgcaggggaccgccgcgtgccatgttacaattttgatcgaggacacagcgccatgggtatggtggctaccacagcagtgcagcccatgacccaaacacacagggcagcaggcacaatggacaggcctgtgagtgaccatgctgggctccagcccgccagccccggagaccatgaaacagatggccaaggtcaccccacagttcagccagacatggctccgtggggtctgcatcgctgctgccctctaacaccagcccagatggggacaaggccaaccccacattaccatctcctgctgtccacccagtggtcccagaagcccctccctcatggctgagccacatgtgtgaaccctgagagcaccccatgtcagagtaggggcagcagaagggcggggctggccctgtgcactgtccctgcacccatggtccctcgcctgcctggccctgacacctgagcctcttctgagtcatttctaagatagaagacattcccggggacagccggagctgggcgtcgctcatcctgcccggccgtcctgagtcctgcttgtttccagacctcaccagggaagccaacagaggactcacctcacacagtcagagacaaagaaccttccagaaatccctgtctcactccccagtgggcaccttcttccaggacattcctcggtcgcatcacagcaggcacccacatctggatcaggacggcccccagaacacaagatggcccatggggacagccccacaacccaggccttcccagacccctaaaaggcgtcccaccccctgcacctgccccagggctaaaaatccaggaggcttgactcccgcataccctccagccagacatcacctcagccccctcctggaggggacaggagcccgggagggtgagtcagacccacctgccctcgatggcaggcggggaagattcagaaaggcctgagatccccaggacgcagcaccactgtcaatgggggccccagacgcctggaccagggcctgcgtgggaaaggccgctgggcacactcaggggctttttgtgaaggcccctcctactgtgtgactacggtgactaccacagtgatgaaactagcagcaaaaactggccggacacccagggaccatgcacacttctcagcttggagctctccaggaccagaagagtcaggtctgagggtttgtagccagaccctcggcctctagggacaccctggccatcacagcggatgggctggtgccccacatgccatctgctccaaacaggggcttcagagggctctgaggtgacttcactcatgaccacaggtgccctggccccttccccgccagctacaccgaaccctgtcccaacagctgccccagttccaacagccaattcctggggcccagaattgctgtagacaccagcctcgttccagcacctcctgccaattgcctggattcacatcctggctggaatcaagagggcagcatccgccaggctcccaacaggcaggactcccgcacaccctcctctgagaggccgctgtgttccgcagggccaggccctggacagttcccctcacctgccactagagaaacacctgccattgtcgtccccacctggaaaagaccactcgtggagcccccagccccaggtacagctgtagagagactccccgagggatctaagaaggagccatgcgcagttctgccgggaccctcggccaggccgacaggagtggacactggagctgggcccacactgggccacataggagctcaccagtgagggcaggagagcacatgccggggagcacccagcctcctgctgaccagaggcctgccccagagcccaggaggctgcagaggcctctccagggggacactgtgcatgtctggtccctgagcagccccccatgtccccagtcctgggggcccctggcacagctgtctggaccctccctgttccctgggaagctcctcctgacagccccgcctccagttccaggtgtggttattgtcagggggtgtcagactgtggtggatacagctatggttaccacagtggtgctgcccatagcagcaaccaggccaagtagacaggcccctgctgtgcagccccaggcctccagctcacctgcttctcctggggctctcaaggtcactgttgtctgtactctgccctctgtggggagggttctctcagtgggaggtctgttctcaacatcccagggcctcatgtctgcacggaaggccaatggatgggcaacctcacatgccgcggctaagatagggtgggcagcctggcgggggacagtacatactgctggggtgtctgtcactgtgcctagtggggcactggctcccaaacaacgcagtcctcaccaaaatccccacagcctcccctgctaggggctggcctgatctcctgcagtcctaggaggctgctgacctccagaatgtctccgtccccagttccagggcgagagcagatcccaggccggctgcagactgggaggccaccccctccttcccagggttcactggaggtgaccaaggtaggaaatggccttaacacagggatgactgcgccatcccccaacagagtcagccccctcctgctctgtaccccgcaccccccaggccagtccacgaaaaccagggccccacatcagagtcactgcctggcccggccctggggcggacccctcagcccccaccctgtctagaggacttggggggacaggacacaggccctctccttatggttcccccacctgcctccggccgggacccttggggtgtggacagaaaggacacctgcctaattggcccccaggaacacagaacttctctccagggaccccagcccgagcacccccttacccaggacccagccctgcccctcctcccctctgctctcctctcatcaccccatgggaatccggtatccccaggaagccatcaggaagggctgaaggaggaagcggggccgtgcaccaccgggcagcaggctccgtcttcgtgaacccagggaagtgccagcctcctagagggtatggtccaccctgcctggggctcccaccgtggcaggctgcggggaaggaccagggacggtgtgggggagggctcagggccctgcgggtgctcctccatcttcggtgagcctcccccttcacccaccgtcccgcccacctcctctccaccctggctgcacgtcttccacaccatcctgagtcctacctacaccagagccagcaaagccagtgcagacaaaggctggggtgcaggggggctgccagggcagcttcggggagggaaggatggagggaggggaggtcagtgaagaggcccccttcccctgggtccaggatcctcctctgggacccccggctcccatcccctcctggctctgggaggagaagcaggatgggagaatctgtgcgggaccctctcacagtggaatatccccacagcggctcaggccagacccaaaagcccctcagtgagccctccactgcagtcctgggcctgggtagcagcccctcccacagaggacagacccagcaccccgaagaagtcctgccagggggagctcagagccatgaaagagcaggatatggggtccccgatacaggcacagacctcagctccatccaggcccaccgggacccaccatgggaggaacacctgtctccgggttgtgaggtggctggcctctgtctcggaccccactccagacaccagacagaggggcaggccccccaaaaccagggttgagggatgatccgtcaaggcagacaagaccaaggggcactgaccccagcaagggaaggctcccaaacagacgaggaggtttctgaagctgtctgtatcacagtggggtatagcagtggctggtaccacagtgacactcgccaggccagaaaccccgtcccaagtcagcggaagcagagagagcagggaggacacgtttaggatctgaggccgcacctgacacccagggcagcagacgtctcccctccagggcaccctccaccgtcctgcgtttcttcaagaataggggcggcctgagggggtccagggccaggcgataggtcccctctaccccaaggaggagccaggcaggacccgagcaccgtccccattgaggctgacctgcccagacgggcctgggcccaccccacacaccggggcggaatgtgtgcaggccccagtctctgtgggtgttccgctagctggggcccccagtgctcaccccacacctaaagcgagccccagcctccagagccccctaagcattccccgcccagcagcccagcccctgcccccacccaggaggccccagagctcagggcgcctggtcggattctgaacagccccgagtcacagtgggtataactggaacgaccaccgtgagaaaaactgtgtccaaaactgactcctggcagcagtcggaggccccgccagagaggggagcagccgccctgaacccatgtcctgccggttcccatgacccccagcacccagagccccacggtgtccccgttggataatgaggacaagggctgggggctccggtggtttgcggcagggacttgatcacatccttctgctgtggccccattgcctctggctggagttgacccttctgacaagtgtcctcagaaagacagggatcaccggcacctcccaatatcaaccccaggcagcacagacacaaaccccacatccagagccaactccaggagcagagacaccccaacactctgggggaccccaaccgtgataactccccactggaatccgccccagagtctaccaggaccaaaggccctgccctgtctctgtccctcactcagggcctcctgcagggcgagcgcttgggagcagactcggtcttaggggacaccactgtgggccccaactttgatgaggccactgacccttccttcctttcctggggcagcacagactttggggtctgggcagggaagaactactggctggtggccaatcacagagcccccaggccgaggtggccccaagaaggccctcaggaggtggccactccacttcctcccagctggaccccaggtcctccccaagataggggtgccatccaaggcaggtcctccatggagcccccttcagactcctcccgggaccccactggacctcagtccctgctctgggaatgcagccaccacaagcacaccaggaagcccaggcccagccaccctgcagtgggcaagcccacactctggagcagagcagggtgcgtctgggaggggctaacctccccaccccccaccccccatctgcacacagccacctaccactgcccagaccctctgcaggagggccaagccaccatggggtatggacttagggtctcactcacgtgcctcccctcctgggagaaggggcctcatgccgagatccctgcagcactagacacagctggaggcagtggccccagggccaccctgacctggcatctaaggctgctccagcccagacagcactgccgttcctgggaagcctgggctccaccagaccacaggtccagggcacagcccacaggagccacccacacacagctcacaggaagaagataagctccagaccccagggcgggacctgccttcctgccaccacttacacacaggccagggagctgttcccacacagatcaaccccaaaccgggactgcctggcactagggtcactgccatttccctctccattccctcccagtgcctctgtgctccctccttctggggaacaccctgtgcagcccctccctgcagcccacacgctggggagaccccaccctgcctcgggccttttctacctgctgcacttgccgcccacccaaacaaccctgggtacgtgaccctgcagtcctcaccctgatctgcaaccagacccctgtccctccctctaaacacccctcccaggccaactctgcacctgcaggccctccgctcttctgccacaagagcctcaggttttcctacctgtgcccaccccctaacccctcctgcccacaacttgagttcttcctctcctggagcccttgagccatggcactgaccctacactcccacccacacactgcccatgccatcaccttcctcctggacactctgaccacgctcccctccctctcagacccggccctggtatttccaggacaaaggctcacccaagtcttccccatgcaggcccttgccctcactgcctggttacacgggagcctcctgtgcgcagaagcagggagctcagctcttccacaggcagaaggcactgaaagaaatcggcctccagtgccttgacacacgtccgcctgtgtctctcactgcctgcacctgcagggaggctccgcactccctctaaagatgagggatccaggcagcaacatcacgggagaatgcagggctcccagacagcccagccctctcgcaggcctctcctgggaagagacctgcagccaccactgaacagccacggaggtcgctggatagtaaccgagtcagtgaccgacctggagggcaggggagcagtgaaccggagcccagaccatagggacagagaccagccgctaacatcccgagcccctcactggcggccccagaacaccccgtggaaacagaacagacccacagtcccacctggaacagggcagacactgctgagcccccagcaccagccccaagaaacactaggcaacagcatcagagggggctcctgagaaagagaggaggggaggtctccttcaccatcaaatgcttcccttgaccaaaaacagggtccacgcaactcccccaggacaaaggaggagccccctgtacagcactgggctcagagtcctctctgagacaggctcagtttcagacaacaacccgctggaatgcacagtctcagcaggagagccaggccagagccagcaagaggagactcggtgacaccagtctcctgtagggacaggaggattttgtgggggttcgtgtcactgtgagcatattgtggtggtgactgctattcccacagtgacacaaccccattcctaaagccctactgcaaacgcacccactcctggggctgaggggctgggggagcatctgggaagtatggcctaggggtgtccatcaatgcccaaaatgcaccagactctccccaagacatcaccccaccagccagtgagcagagtaaacagaaaatgagaagcagctgggaagcttgcacaggccccaaggaaagagctttggcaggtgtgcaagaggggatgtgggcagagcctgagcagggccttttgctgtttctgctttcctgtgcagagagttccataaactggtattcaggatcaatggctgggagtgagcccaggaggacagtgtgggaagagcacagggaaggaggagcagccgctatcctacactgtcatcttttgaaagtttgccctgtgcccacaatgctgcatcatgggatgcttaacagctgatgtagacacagctaaagagagaatcagtgaaatgcatttgcagcacagatctgaataaatcctccagaatgtggagcagcacagaagcaagcacacagaaagtgcctgatgccaaggcaaagttcagtgggcaccttcaggcattgctgctgggcacagacactctgaaaagcactggcaggaactgcctgtgacaaagcagaaccctcaggcaatgccagccctagagcccttcctgagaacctcatgggcaaagatgtgcagaacagctgtttgtcatagccccaaactatggggctggacaaagcaaacgtccatctgaaggacaacagacaaataaacgatggcaggttcatgaaatgcaaactaggacagccagaggacaacagtagagagctacaggcggctttgcggttgagttcatgacaatgctgagtaattggagtaacagaggaaagcccaaaaaatacttttaatgtgatttcttctaaataaaatttacacccggcaaaatgaactatcttcttaagggataaactttcccctggaaaaactataaggaaaatcaagaaaacgatgatcacataaacacagtggtggttacttctactggggaaggaagagggtatgagctgagacacacagagtcggcaagtctcctaacaagaacagaacaaatacattacagtaccttgaaaacagcagttaaacttctaaatcgcaagaagaggaaaatgcacacacctgtgtttagaaaattctcagtccagcactgttcataatagcaaagacattaacccaggttggataaataagcgatgacacaggcaattgcacaatgatacagacatacattcagtatatgagacatcgatgatgtatccccaaagaaatgactttaaagagaaaaggcctgatgtgtggtggcaatcacctccctgggcatccccggacaggctgcaggctcactgtgtggcagggcaggcaggcacctgctggcagctcctggggcctgatgtggagcaggcacagagctgtatatccccaaggaaggtacagtcagtgcattccagagagaagcaactcagccacactccctggccagaacccaagatgcacacccatgcacagggaggcagagcccagcacctccgcagccaccaccacctgcgcacgggccaccaccttgcaggcacagagtgggtgctgagaggaggggcagggacaccaggcagggtgagcacccagagaaaactgcagaagcctcacacatccacctcagcctcccctgacctggacctcacctggcctgggcctcacctgacctggacctcacctggcctgggcttcacctggcctgggcttcacctgacctggacctcacctggcctcgggcctcacctggcctgggcttcacctggcctgggcttcacctgacctggacctcacctggcctgggcctcacctgacctggacctcacctggcctgggcttcacctggcctgggcttcacctggcctgggcttcacctgacctggacctcacctggcctgggcttcacctgacctggacctcacctggcctcgggcctcacctgcacctgctccaggtcttgctggagcctgagtagcactgaggctgtagggactcatccagggttggggaatgactctgcaactctcccacatctgacctttctgggtggaggcacctggtggcccagggaatataaaaagccccagaatgatgcctgtgtgatttgggggcaatttatgaacccgaaaggacatggccatggggtgggtagggacagtagggacagatgtcagcctgaggtgaagcctcaggacacaggtgggcatggacagtgtccacctaagcgagggacagacccgagtgtccctgcagtagacctgagagcgctgggcccacagcctcccctcggggccctgctgcctcctcaggtcagccctggacatcccgggtttccccaggcctggcggtaggtttgaagtgaggtctgtgtcactgtggtattactatgatagtagtggttattactaccacagtgtcacagagtccatcaaaaactcatgcctgggagcctcccaccacagccctccctgcgggggaccgctgcatgccgtgttaggattttgatcgaggacacggcgccatgggtatggtggctaccacagcagtgcagcccatgacccaaacacacggggcagcagaaacaatggacaggcccacaagtgaccatgatgggctccagcccaccagccccagagaccatgaaacagatggccaaggtcaccctacaggtcatccagatctggctccaaggggtctgcatcgctgctgccctcccaacgccaaaccagatggagacagggccggccccatagcaccatctgctgccgtccacccagcagtcccggaagcccctccctgaacgctgggccacgtgtgtgaaccctgcgagccccccatgtcagagtaggggcagcaggagggcggggctggccctgtgcactgtcactgcccctgtggtccctggcctgcctggccctgacacctgagcctctcctgggtcatttccaagacattcccagggacagccggagctgggagtcgctcatcctgcctggctgtcctgagtcctgctcatttccagacctcaccagggaagccaacagaggactcacctcacacagtcagagacaacgaaccttccagaaatccctgtttctctccccagtgagagaaaccctcttccagggtttctcttctctcccaccctcttccaggacagtcctcagcagcatcacagcgggaacgcacatctggatcaggacggcccccagaacacgcgatggcccatggggacagcccagcccttcccagacccctaaaaggtatccccaccttgcacctgccccagggctcaaactccaggaggcctgactcctgcacaccctcctgccagatatcacctcagccccctcctggaggggacaggagcccgggagggtgagtcagacccacctgccctcaatggcaggcggggaagattcagaaaggcctgagatccccaggacgcagcaccactgtcaatgggggccccagacgcctggaccagggcctgtgtgggaaaggcctctggccacactcaggggctttttgtgaagggccctcctgctgtgtgactacggtggtaactcccacagtgatgaaaccagcagcaaaaactgactggactcgcagggtttatgcacacttctcggctcggagctctccaggagcacaagagccaggcccgagggtttctgcccagaccctcggcctctagggacacccgggccatcttagccgatgggctggtgccctgcacaccgtgtgctgccaaacaggggcttcagagggctctgaggtgacttcactcatgaccacaggtgccctggtcccttcactgccagctgcaccagaccctgttccgagagatgccccagttccaaaagccaattcctggggccgggaattactgtagacaccagcctcattccagtacctcctgccaattgcctggattcccatcctggctggaatcaagagggcagcatccgccaggctcccaacaggcaggactcccacacaccctcctctgagaggccgctgtgttccgcagggccaggccgcagacagttcccctcacctgcccatgtagaaacacctgccattgtcgtccccacctggcaaagaccacttgtggagcccccagccccaggtacagctgtagagagagtcctcgaggcccctaagaaggagccatgcccagttctgccgggaccctcggccaggccgacaggagtggacgctggagctgggcccacactgggccacataggagctcaccagtgagggcaggagagcacatgccggggagcacccagcctcctgctgaccagagacccgtcccagagcccaggaggctgcagaggcctctccagggggacacagtgcatgtctggtccctgagcagcccccaggctctctagcactgggggcccctggcacagctgtctggaccctccctgttccctgggaagctcctcctgacagccccgcctccagttccaggtgtggttattgtcagggggtgccaggccgtggtagagatggctacaattaccacagtggtgccgcccatagcagcaaccaggccaagtagacagacccctgccacgcagccccaggcctccagctcacctgcttctcctggggctctcaaggctgctgtctgccctctggccctctgtggggagggttccctcagtgggaggtctgtgctccagggcagggatgactgagatagaaatcaaaggctggcagggaaaggcagcttcccgccctgagaggtgcaggcagcaccacagagccatggagtcacagagccacggagcccccagtgtgggcgtgtgagggtgctgggctcccggcaggcccagccctgatggggaagcctgccccgtcccacagcccaggtccccaggggcagcaggcacagaagctgccaagctgtgctctacgatcctcatccctccagcagcatccactccacagtggggaaactgagccttggagaaccacccagccccctggaaacaaggcggggagcccagacagtgggcccagagcactgtgtgtatcctggcactaggtgcagggaccacccggagatccccatcactgagtggccagcctgcagaaggacccaaccccaaccaggccgcttgattaagctccatccccctgtcctgggaacctcttcccagcgccaccaacagctcggcttcccaggccctcatccctccaaggaaggccaaaggctgggcctgccaggggcacagtaccctctcttgccctggctaagacagggtgggcagacggctgcagataggacatattgctggggcatcttgctctgtgactactgggtactggctctcaacgcagaccctaccaaaatccccactgcctcccctgctaggggctggcctggtctcctcctgctgtcctaggaggctgctgacctccaggatggcttctgtccccagttctagggccagagcagatcccaggcaggctgtaggctgggaggccacccctgtccttgccgaggttcagtgcaggcacccaggacaggaaatggcctgaacacagggatgactgtgccatgccctacctaagtccgcccctttctactctgcaacccccactccccaggtcagcccatgacgaccaacaacccaacaccagagtcactgcctggccctgccctggggaggacccctcagcccccaccctgtctagaggagttggggggacaggacacaggccctctccttatggttcccccacctggctcctgccgggacccttggggtgtggacagaaaggacgcctgcctaattgtcccccaggaacccagaacttctctccagggaccccagcccgagcacccccttacccaggacccagccctgcccctcctcccctctgctctcctctcatcactccatgggaatccagaatccccaggaagccatcaggaagggctgaaggaggaagcggggccactgcaccaccgggcaggaggctccgtcttcgtgaacccagggaagtgccagcctcctagagggtatggtccaccctgcctggggctcccaccgtggcaggctgcggggaaggaccagggacggtgtgggggagggctcagggccctgcaggtgctccatcttggatgagcccatccctctcatccaccgacccgcccacctcctctccaccctggccacacgtcgtccacaccatcctgagtcccacctacaccagagccggcagagccagtgcagacagaggctggggtgcaggggggccgccagggcagctttggggagggaggaatggaggaaggggaggtcagtgaagaggcccccctcccctgggtctaggatccacctttgggacccccggatcccatcccctccaggctctgggaggagaagcaggatgggagaatctgtgcgggaccctctcacagtggaatacctccacagcggctcaggccagatacaaaagcccctcagtgagccctccactgcagtgctgggcctgggggcagcccctcccacagaggacagacccagcaccccgaagaagtcctgccagggggagctcagagccatgaaggagcaagatatggggaccccaatactggcacagacctcagctccatccaggcccaccaggacccaccatgggtggaacacctgtctccggcccctgctggctgtgaggcagctggcctctgtctcggacccccattccagacaccagacagagggacaggccccccagaaccagtgttgagggacacccctgtccagggcagccaagtccaagaggcgcgctgagcccagcaatggaaggcccccaaacaaaccaggaggtttctgaagctgtctgtgtcacagtcgggtatagcagcggctaccacaatgacactgggcaggacagaaaccccatcccaagtcagccgaaggcagagagagcaggcaggacacatttaggatctgaggccacacctgacactcaagccaacagatgtctcccctccagggcgccctgccctgttcagtgttcctgagaaaacaggggcagcctgaggggatccagggccaggagatgggtcccctctaccccgaggaggagccaggcgggaatcccagccccctccccattgaggccatcctgcccagaggggcccggacccaccccacacacccaggcagaatgtgtgcaggcttcaggctctgtgggtgccgctagctggggctgccagtcctcaccccacacctaaggtgagccacagccgccagagcctccacaggagaccccacccagcagcccagcccctacccaggaggccccagagctcagggcgcctgggtggattctgaacagccccgagtcacggtgggtatagtgggagctactaccactgtgagaaaagctatgtccaaaactgtctcccggccactgctggaggcccagccagagaagggaccagccgcccgaacatacgaccttcccagccctcatgacccccagcacttggagctccacagtgtccccattggatggtgaggatgggggccggggccatctgcacctcccaacatcacccccaggcagcacaggcacaaaccccaaatccagagccgacaccaggaacacagacaccccaataccctgggggaccctggccctggtgacttcccactgggatccacccccgtgtccacctggatcaaagaccccaccgctgtctctgtccctcactcagggcctgctgaggggcgggtgctttggagcagactcaggtttaggggccaccattgtggggcccaacctcgaccaggacacagatttttctttcctgccctggggcaacacagactttggggtctgtgcagggaggaccttctggaaagtcaccaagcacagagccctgactgaggtggtctcaggaagacccccaggagggggcttgtgccccttcctctcatgtggaccccatgccccccaagataggggcatcatgcagggcaggtcctccatgcagccaccactaggcaactccctggcgccggtccccactgcgcctccatcccggctctggggatgcagccaccatggccacaccaggcagcccgggtccagcaaccctgcagtgcccaagcccttggcaggattcccagaggctggagcccacccctcctcatccccccacacctgcacacacacacctaccccctgcccagtccccctccaggagggttggagccgcccatagggtgggggctccaggtctcactcactcgcttcccttcctgggcaaaggagcctcgtgccccggtcccccctgacggcgctgggcacaggtgtgggtactgggccccagggctcctccagccccagctgccctgctctccctgggaggcctgggcaccaccagaccaccagtccagggcacagccccagggagccgcccactgccagctcacaggaagaagataagcttcagaccctcagggccgggagctgccttcctgccaccccttcctgccccagacctccatgccctcccccaaccacttacacacaagccagggagctgtttccacacagttcaaccccaaaccaggacggcctggcactcgggtcactgccatttctgtctgcattcgctcccagcgcccctgtgttccctccctcctccctccttcctttcttcctgcattgggttcatgccgcagagtgccaggtgcaggtcagccctgagcttggggtcacctcctcactgaaggcagcctcagggtgcccaggggcaggcagggtgggggtgaggcttccagctccaaccgctccactagccgagactaaggaagtgagaggcagccagaaatccagaccattccatagcaaatggatttcattaaagttaccagacttcagtgtaagtaacatgagccccatgcacaacaatcccttatgaaggggaagtcagtgtcgcctcggatttcttgaaaaacacaaaaacttatcaatgcctgtaaaagtctgttggaaagaaaatatgattcaagaatgttatgcccaacaaagctggcatattttctacccggacacactcagggaatgtggtcgcttgagtgcttctctcactgcgtaaatcctacgtggtgtttaagcatattcataaatgtgtatgtctatttttatgtgtaagatggttcatttttattttatttattcaatatgtacaataaagaatattgacaaataggctggacatggtggctcccacctgtaatcccagccctttgggaggccgaggcgggcagatcacctgaggtctggagttcgagaccagcctggccaacatgatgaaaacccatctctactaaaaatacaaagattagccaggcatggtggtgcatgcctgtaatcccagccactcaggaggctgagacaggagaaatgcgtgaacccggaaggcggaggttgcagtgagccgagatcacaccactgcactccagcctggcgacagagcaagattccatctcaaaaaaaaaagacaaagaaatttgtttttttgaataaagacaaatttcatcacacgaagataaagatgcaaagctccagacaggaaggcacggacagcacagtgaagcctggagcgggcgctggggggccaggggcatggcgggggtgccagcgtctctcagtgcctaccatggccactccagcctgtgttctcacgaggatggctgtgcaatgctaggagcgtgttcgaagctctagggcaaccactggaagtgaggctgaggagcagagcccagaggcccgtggagctgatgaaaagaaagctggagaaagtgtttgctgcctcccaacatggtaagaaaagatagaaagagagagcacacggcaaagggagcttgctgagggactctttacaatggcttgcacagagctcagggggtctgggaggctagggccctgcgcagggcagtcaccccagcctgctgaccaaggtttgctgcaggcagctctgggggtggttgaggcgcggtccctggagccacccctcaagggaacgaggcagcagagtgggccaaggcccaggtcggctgcaaggctgcccaggacttggggtccttacatcagcagccactgatgcagctggcccagagagaggcgccgagcaggttgcctccaggggacaaaccaggtcggagagggtgaggcagtggatggagccacaacaaccccgggcacgggtgacacgcacgttcatgcacatctgacccttcctccctcaccaaacaggtccccctgccttccccatggttgcgaaaaagcaaaatgtagacgttttttcttttttaattcatgttttaattgacaaatgaagccgtatatatttattgtgtacaacatgatgctttaaaatatgtatacatcgtggaacagcaacgtcgagctaatttaacacgcattacttcacatacttgtcatcttttgtggcgagaatgcttaaaatccactctcttagtattttttaagaatgcaatacattgttgtcaactgtggtcaccgtcatgcatagccaagctcccgacctcaccctcctgccagctcaggctgtgcatcctttcaccagcatcccccaccccggcccctggccctggtaactaccactctatactctacgtatgagttcagctttttaagattccacagatgaatgagatcatacagtatttgctttctatgcctggcttattttagttaacacactgtcctccagatccatccgttgttgcaaatgacagggtttcattctttttaaagtctaaagagtattccattgtgtcaatggacctcatttgctttatccatgcatcaactatggacatttaggttgattccatttcttagctgttgtggatggtgctgcagtaaacatggggctgcagatgtctcttcaacatactgacatcatgtcctttggataaatacccagtagtgggatcgctggatcacaatgtacagttttttttttaatggaaactttcattttttggtgaaattaggaaaacagataaaacccacagaatccaaaatatatgtgaagatgccaaaaacagttgacattgggcagaggtcacatggaaggaagtgaatacatgacggggtgtgagggcccagaggcagctgaaatacgctttctaaacacaaggacctcttctgagagggcagaagttttatcctgcacatgcaatgaccagcacagctaaaatacactttctaaacatgaggacctcttctgagagggcagctttatcctgcaaatgcaatgaccagcacaggacccagaataaagagagttgccagcggacgcctggtgtccatgtgtccaggtgagttcgagatgcggacggcgctggccagccagtcacaccctaagtcaatctgctgcatgcatttgtccttgccacagcagaaaacgagaaagcctttgggctgcaaagcttcacaggctcctcttctcccgactccatggaaacagctacaaagagcaggcccagtagagcttaattcatgaaaatgagtaataaacttgaactggaacagtatcgactttttagaaacggcagcaaagtgtataaaaaatattcaccagaacaatatttccaaacgatgagatgagaatttcagccaagtaatcctccatggatagaaaataatgaagggattggatttatgaaggaaaatcatggagctcaaatacaagagaagagaatcaaaaatgaacaggaggagataaaatatggtttggccaaagttacaaaataaattttttaaaaacccttcatcatggcaagtagaaagagcgagaggaaaaacagatcccgtggaagacacaaataggacatggggagaaaaatgaatgagatgaaacagagcagaaataaaattttacggaactaaagacaagtgatctgaacctgcctggggcctgggggacctcgccaccctgaagggaaagaacatgcctggctggctttgccacctgctcattgcagagccccacagcttgcaacaaacataggcggtagccagggagtggttacagcaggccttgagcaagacccagtgttgtgctgacttcaggtctgacccagcactgtcatagtggtggtgtccatagtggtagtgggggtgcttgtgtcactccacccccatctccaggaggctcagaacagacagagagagactccatttgtttgggagaaagtaagggatgagaacaagagtctctgcctggtaatccagagaattattctagatcttggccaagattatcaaagcagtacctctatgagtcttttgggcttggagtccccctaaagcagatatagctaagatcacaacacccaagtccttttgaatatgtgggaagacttcccaaggacaggagcaaacaaacaagcccagactgcaaaaaaacaagcccagactgcaataaacacctcactcttcaatgcccaggcactgaagaacatctcctagcagcaacaccatccaggaaaacatggcctcaaccagtgaactaaataaggcaccagggaccagtctcggagaaatagaggtatgttatctttcagagaattcaaagtagctttgttgaggaaactcaaagaaattcaagataacacagtgaaggaattcagaatcctatccgataaatttaacagagattgaagcaattaaaaagaattaagcagaaattatggagctgaaaaatgcaattggcatactgaaaaatgcatcagagtattttcatagcctcatatatcaagtagaagaaagaattagtgagcttgaaaacaggctatttggaaaagcacgataaaaggagacaaaagagaaaagaataaataacaatgaagcatatctacaggatctagaaaatagcctcaaaaggccaaatctaagaattattagccttaaagaggaggtagagaaagagggatggagagtttattcaaagggataataacagaaaacttcccaaacctagagaaagatatcaatatccaaatgcaagaaggatgtagtacaccaaggagatttaatgcaaagaagactacctcaaggcattcaatactcaaactcccatatgacaaggactttaaaaagatcctaaaagcagcaaaagaaaagaaatgaataaaatactatggagctccaatatgtctggcagcagacttttcagtgaagactttatatgccaggagagagtgtcataatggatttaaagtgctgaaggaaaaaacttttaccctcgaacagtatagctggtgaaattatccttcaaacatgaaggagaaataatttgtttccagacaaatgttgagggatttcatgaacaccagacctgtcttttaagaaatgctaaagggagtacttcaatcagaaagaaacacgttagtgaacaataagaaatcatctgaaggcacaaaactcaccggtaatagtaagtacacagaaaaacacagaatattataacactgtaactgtggtgtgtaaactccttttgtttgtttgtttgtttgtttgtttgtttgtttttgtttttagacggagttttgctccagcccaggctggagtgcaatggcacaatctcagctcactgcaacttccacctcctgggttcaagcaattctcctgcctcagcctcccaagtagctgggattacaggcatgtgctaccatgtccagctaattttgtattttagtagagacggtgtttcaccatgttggtcaggctagccttatcttgagtagaaaaactaaatgatgaagcaatgaaaaataataactacaacttttcaagacatagtacaataagatataaatcataacaaaaagttaaaaggtggagggatgaagttaaggcatagagtctttattagttttctttttacttgtctgtttatgcaaacagtgttaagttgtcatcagtttaaaataatgggtcataagatactatttgcaagcctcatggtaacgtcaaaccaaaagcaatacaacagatacacaaaaaacaaaaagcaagaagctaaattacgtcatcagagaaaatcaccttcactaaaaggaagacggagaaaagaatgaagagagagaagaccaaaagcaaatagcaatatggcaggagtaagtccttacttatcaataataccattgaatgtaaatggactaaactctccaatcaaaagacatagagtggctgaatcaattaaagaaaaaacaagacccattgatctgttgtccacaagaaacacactttatctataaagacacacatagactgaaaacaaagggatggaaaaagatactccacgccaatggaaaccaaagaaagagcaggagtagctacacttatatcaggcaaaatagatttcaagacaaaaactataagaagagacaaggtcactaatgataaacaggtcaattcagcaagaggatataacaattgtaaatatatatgcacccaatgctggagcacccagatatataaagcaagtatttactagagctaaagagagaaatagactccaatgcaataatagctggagatttcaacatcccactttcaacattgaacagatcctccagatagaaaatcaacaaagaaatattggacttaatctgcactatcgaccaaatggatctaacagatatttacagaacatttcatccaacagctgcagaacacacattcttttcctcagcacatagatcattctcaaggatagaccatatgttgggtcacaaaacaagttttaaaatattcaaatacattgaaataatatcaagcatcttctgtgaccacaatggactaaaactagaaatcaataacaagaggaattttggaaactatataaatatatggaaattaatgaatgctgagtgggtcaatgaagcaattaagaaggaaactgaaatttttcttggaacgaatgatcatggaaacagaaaataccaaaacctatgggatacagcaaaagcagtactaagagggaagtttacagctacaaatgcttacattaaaaaagaagaaaaacttcaataaaaaaacctaacaatgcatcttaaagaactagaaaagcaagaggaaatcaaatccaaaattagtagaagaaaacagtaaaggtcagagcagaaataagtaaaattgaaatgaagaaaacaatacaaaagatcaataaaacaacaggttgttttcttgaaaagttaaacaaaattgacaaacctttagccagactaagaaaaaaagacagaagatccaaataaataaaatcagagatgaaaaaggtgacattacaacttacaccacagaaattcaaaggatcattagtggctactataagcaactatatgccaataaattggaaaatctagaagaaatgcagaaattcctagacacatacaacctcccaagattaaaccaagaagaaattcaaaacctgaacagactgataacaagtaatgagatcaaagccgtaataaaaagcctcccagtaaagagaagcccaggacccgacggcttcactgctgaattctaccaaacatttaaagtagaactaataccaatcctactcaaactattccaaaaaatagaggtggaaggaatacttcaaaactcattatacgaggccagtattaacctgacaccaaaactagacaaagacacatgaaaaaaagaaaactacaggccaatatgtctgatgaatattgacacaaaaatcctcaacaaaatactagcaaaccaaattcaactacacattagaaagttcactcatcatgaccaagtggaatttatctaacttgggatgcaaagatggttcaacatatgcaaatcaatcaatgtgatacatcatatcaacagaatgaacaacaaaaaccatttgatcatttaattgatactgaaaaagcatttgataaaattcaacattccttcataataaaaattctcttctatactaggtacaaaagaaacttacctcaacataataaagccatatatgacagtcccacagtatgatactaaatgaggaaaaactgagagcctttcctctacgatctggaacatgacaaagatgcccactttcatcactgttattcaacatagtactggaagtcctagctggagcgatcagacaagagaaagatataaaaggcatccaaattggaaaggaataagtcaaattatcctcatttgcatatggtatgatcttctatttagagctaactaaagactccaccaaaaaaagttattagaactgacgaacaaattcagtaaagctgcaggatacaaaatcaacatacaaaaatcagtagcatttctatatgccaacaatgaccaatgtgaaaaagaaattaaaaagtaaccctatttacaataaccacaaataaacacctaggaattaaccaaagaggtaaaagatttctgtaatgaaaactataaaacactgatgaaagaaattgaagagtacaccaaaaaatggaaagcaattgcatgttcatggattagaagaatcagtgttgttataatgtccatactatccaaagcaatctacagattcaatgcaatccttatcaaaataccaatgacatcattcacagaaatagaaaaaaaaaatcctaaaatttacgtggaaccacaaagacccagaatagccaaagctctcctaagcaaaaagaacgaaactgtaggaatgacattgcctgtcttcaaattctactacagagctatagatagtaaccaaaacagcgtggtactagcataaaaacagacacagagacaaacagaacaaaatttaaaaacccagaaataaatccacacacctacagcaaattcatttttgacaaagttgccaagaacatactctggggaatagataatgatatctcttcaataaataatgtggggaaaactggatatccatatacataacagtgaaactagacccctctctctctcactatatacaaaaatcaaatcaaaattgtttaaggacttaaatctaagacctcatactatgaaaccactgcaagacaaccttggcggaaactctccaagacatcagtccaggcaaagatttcttgagtaatatcccacaagcacagacaaccaaagcaaaaatggacaaatgggatcacatcaagttaaaaagcttctgcacagtaagggaaacaaccaacaaaatgaagagacaacccacagaatgggagaaaatatttgaaaaatacccatctggcaagggattaaaaaccagaatatatgcagaatatataaggagctcaaacagtgctatagaaaaaaaaatctaataatctgatttaaaaatgggaaaaatgttagaatagacatttcttaaaataagacatacagatggcaaaccgacatggaacggtgctcaacatcatggattatcacagaaacacaatcaatcaaaactaaaactaaaatgtgctatcatctcaccccagttaaaatggctgatatccagaagacaggcaataacaaatgctggcaaggatgtggggaaaagggagcccccatacactgttgctgggattgtaaattagtacaaccactgtggagagcagcatgaaagttcctcaaaaaactgaaagaaagctaccataggatccagcaatcccactgctgtgtatatactacaaaagaaaggaagtcagtatatgaagaggtatctgcactcccatgtttgttgcagccctgttcacaacagccaagatttggaagcaacctaagtgtccatcagcagttgaatgtataaagaaaatgtggtgcatatacacaatggagtattattcaataataaaaaggaatgagattgagtcatttgcaacaacatggatggaactggagatcattatgtgaagtgaaataagccaggcacagaaagacaaacattacaatgttcttacttattaatgagatctaaaaatcaaaacaattgcacccatgttcataaagagtaaaaggatggttaccagatgctgagaacggtggtggggggatagggaaaggtggcagtggttaacgggtacaaaaaaatagaaagaatgaataagacttactacttgatagcacagcaaggtggctatagtcagtaatttagttgtatatttttaataatgaaaggtgtataattggattgtttctaacacaaaggataatgcttaagaggatggataccccattttccatgatgtgattatttcacattgcacgcctagatcaaaacatccaatgtaccccataaatatatacatcttctatgtacccataaaaattctgtaaaataaaatatataaaaagaggtgacagatatggaagacaggcaaagaagagacgacatccacataatccgagtacctaagaaagaatggagtccagtgcatctcaggagccaccattctaagccaattttctctggttctctcagtcaccctaccaatacgtgggcaatcttgttttatttcaggatagagtttttgaaattatagatttaagtatgctttctgttctattacttttggtaattaattttagaaagaactaatttgggcacaaatttgaaaaaattctaaatccaaaaaaaaaaagaaaaaaacacacacacaatcatctataagggggatgatgaccagtcctagatttctcaccagccacattcaagatcagtaaatggtaggacaaaacctgtagggtccttaagggggaaagaagtagtggatagtccagagtctatatacagccaactgttcttgaagaaaaaaggctgctgaaaaggagttccaaacattctataatccataatctcatgatgaaactactagaggaagaccaccagccatcaaaaggtgcttggagaacccagggccaagaaccaaaagtaaatattaagtgtccttaactgcgagactaagatagaaatgactgtgggggaccatgtggcctcaacagaggtgaaatggtgtctgcctgacaaagtggacattttacaatgatcaaaacacagaatatgagatagagagcacttctgaattactgcctcactccaaataactctcagccaaaggacttcagtaaaaccaaattgggcatattagacagtacaaacaaattctaagaaaataatattactgattacaatcacatgatgctagagatggaggggaaaaggaagaggaaaccaggtaatttcatactcgtatatagtaaagaactaaagtacattgtccaaagaagaacaaagaatattttggaaagttataaaggtagccactacacatagaagatagcaaagaacaagaaaacttaagatggaaaactttttggaagcataaaaatagaaaatataaactactaagataagattgaagccaaacagatctatgaaaacaacaaacatcaatggccttaacttgcctattaaaaggaagagactttcaaattggaccacaagataaaacccaactctatatagcatatgagtattacacacaaaatgggaaaagctgaaaaaacttgggcaaaattcaccccaagcaaattccactgtttcctttgggacaaaatgccaagctccatgccagggaagatgattctcctcagaccttctcctcactctcccagtcctcttagggaaggaattgggtgttagaggagggagactctgtcgattatcagctgaagcagtggtgtgctcctgcgttgcttctgacctgggaaatgaagcagcaagactctttctgctgtgtctttgcccagaagggccatccccccagagcagagtacccaggccggcaggagcagtggtggaagcgtggaaaccacgtctcctacagcagagaccatcagaagcggagcctcgggtataagggaaacaacgcgttctccctaacctgggagtgacagacagcgtcattcctcacagtgataccctgtgttctagccatctggcccatgacagagccagcccagagccagcccagagccagcccctcaccaacctggagcctggccagctcgccaagctgcaccataggcctggaaggcgtggagacctgcggcagtgccctgtcctcccgtgaggcctgccatccctgccaggggtcgcctctggcttctccttctccaggaccgcacggtccagaggctcagtgcctggagtaggtgttgcccccctgcttctaggcccagaccctcccttgttcctgaccccgggcctttccctctggcttggacatccagggccctgtctcagctggggagctgctcctgctcaaggactgtcttccgcgggatcgaaaggccgcgtcctgaacaatgcgtgggccacgtgagcggagcaggctctaaaggccgcgtcctaaacagtgcgtgggccacgtgagcggagcaggctctaaaggccgcgtcctaaacagtgcgtgggccacgtgagcggagcaggctctaaaggccgcgtcctaaacagtgcgtgggccacgtgagcggagcaggctctaaaggccgcgtcctaaacagtgcgtgggccacgtgagcggagcaggctctaaaggccgcgtcctaaacagcgcgtgggccacgtgagcggagcaggctctaaaggccgcgtcctaaacagtgcgtgggccacgggagcggagcagactctaaaggccgcgtcctaaacagtgtgtgggccacgtgagcggagcgccctctccactgccctcggggccgcagctcccagctcagctcccagccctgctcagggcagccaggccaggaggtaccatccaggctaagtgaccctcaggggggacaggtgccccaggagatgccagctgttgggagaggctgggggaccaactcgacctggcctgtgggccctgccctggccacccattgtaggatccagccgccacgcctgtgacactcgtgtgctttccctggtgtgtgcttgtggcaggtgggggcagagggtcctcaggccagagagccactcccccagcgccagaccaccctcttcctcactcccccacctcaccccctcacaggtgcctcccaggccatcagggcccaaccacccctaaacaaatgggttctcggcccctcgtggctggaggtgggttctctcaccattcccagcctaagactccatccccatgctggcagctgttcaaccatgtctagagagatccactgtcccagacagcacctcagggtcccccgtcctgcctggaaccctgtaggaaactccacaaaccgccgccattctgtccacacccctacaggagccccaaccctctccccacatccaggcttccctcccagacccctcatccctgcccgcacggtgcctgagggggccttcttgggcagcgcctaagcaagcccccagcacccttcggccccttcaaggcacacaggccccctttccacccagcctcaggaaaccacctgtgtcctccaacgacaggtcccagcctcccagcctttgccttgcctgttcctctccctggaactctgccccgacacagaccctccccagcaagcccgcagggcacctcccctgcccccagacaccctgtgcccatcagttcatccccagcagaggccctcaccaggcacacccccatgctcacacctggccgcaggcctcagcctccctgagggccccacccagcccgcgtctggccagtggtgcgtgcaaagcccctcacccagactcggcggaaggcagccagtgcaggcctggggaggggctctccttagaccaccttgcaccttccctggcacccaccatgggaagagctgagactcactgaggaccagctgaggctcagagaagggacccagcactggtggacacgcagggagcccacgccagggcgccgtggtgagtgaggcccagtgccacccactgaggcctcccgttcagtgggacgacggtgaacaggtggaaccaaccaggcaacccccgccgggccccacagacgggatcagagcaggaaaggcttcctgcccctgcaggccagcgaggagccctggcgggggccgtggccctccaggcgaggaggctcccctggccaccgccacccgggcctctctgctgctgggaaaacaagtcagaaagcaagtggatgagaggtggcgtgacagacccagcttcagatctgctctaatttacaaaagaaaaggaaaaacacacttggcagccttcagcactctaatgattcttaacagcagcaaattattggcacaagactccagagtgactggcagggttgagggctggggtctcccacgtgttttggggctaacagcggaagggagagcactggcaaaggtgctgggggcccctggacccgacccgccctggagaccgcagccacatcagcccccagccccacaggccccctaccagccgcagggttttggctgagctgagaaccactgtgctaactggggacacagtgattggcagctctacaaaaaccatgctcccccgggaccccgggctgtgggtttctgtagcccctggctcagggctgactcaccgtggctgaatacttccagcactggggccagggcaccctggtcaccgtctcctcaggtgagtctgctgtctggggatagcggggagccaggtgtactgggccaggcaagggctttggcttcagacttggggacaggtgctcagcaaaggaggtcggcaggagggcggagggtgtgtttttgtatgggagaagcaggagggcagaggctgtgctactggtacttcgatctctggggccgtggcaccctggtcactgtctcctcaggtgagtcccactgcagccccctcccagtcttctctgtccaggcaccaggccaggtatctggggtctgcagccggcctgggtctggcctgaggccacaccagctgccatccctggggtctccgccatgggctgcatgccagagccctgctgtcacttagccctggggccagctggagcccccaaggacaggcagggaccccgctgggcttcagccccgtcagggaccctccacaggtagcaagcaggccgagggcagggacgggaaggagaagttgtgggcagagcctgggctggggctgggcgctggctgttcatgtgccggggaccaggcctgcgctttagtgtggctacaagtgcttggagcactggggccagggcagcccggccaccgtctccctgggaacgtcacccctccctgcctgggtctcagcccgggggtctgtgtggctggggacagggacgccggctgcctctgctctgtgcttgggccatgtgacccattcgagtgtcctgcacgggcacaggtttgtgtctgggcaggaacagggactgtgtccctgtgtgatgcttttgatatctggggccaagggacaatggtcaccgtctcttcaggtaagatggctttccttctgcctcctttctctgggcccagcgtcctctgtcctggagctgggagataatgtccgggggctccttggtctgcgctgggccatgtggggccctccggggctccttctccggctgtttgggaccacgttcagcagaaggcctttctttgggaactgggactctgctgctggggcaaagggtgggcagagtcatgcttgtgctggggacaaaatgaccttgggacacggggctggctgccacggccggcccgggacagtcggagagtcaggtttttgtgcaccccttaatggggcctcccacaatgtgactactttgactactggggccagggaaccctggtcaccgtctcctcaggtgagtcctcacaacctctctcctgctttaactctgaagggttttgctgcatttctggggggaaataagggtgctgggtctcctgccaagagagccccggagcatcctggggggctcaggaggatgccctgaggcaacagcggccacacagacgaggggcaagggctccagatgctccttcctcctgagcccagcagcacgggtctctctgtggccagggccaccctaggcctctggggtccaatgcccaacaacccccgggccctccccgggctcagtctgagagggtcccagggacgtagcggggcgccagttcttgcctggggtcctggcattgttgtcacaatgtgacaactggttcgacccctggggccagggaaccctggtcaccgtctcctcaggtgagtcctcaccaccccctctctgagtccacttagggagactcagcttgccagggtctcagggtcagagtcttggaggcattttggaggtcaggaaagaaagccggggagagggacccttcgaatgggaacccagcctgtcctccccaagtccggccacagatgtcggcagctggggggctccttcggctggtctggggtgacctctctccgcttcacctggagcattctcaggggctgtcgtgatgattgcgtggtgggactctgtcccgctccaaggcacccgctctctgggacgggtgccccccggggtttttggactcctgggggtgacttagcagccgtctgcttgcagttggacttcccaggccgacagtggtctggcttctgaggggtcaggccagaatgtggggtacgtgggaggccagcagagggttccatgagaagggcaggacagggccacggacagtcagcttccatgtgacgcccggagacagaaggtctctgggtggctgggtttttgtggggtgaggatggacattctgccattgtgattactactactactactacatggacgtctggggcaaagggaccacggtcaccgtctcctcaggtaagaatggcctctccaggtctttatttttaatctttgcctatggagttttcagagtattgcatactaaccccggagatgtgtcaagctggccgggagaagctagggactaaactgcctaggggatctcagagccttggggataaactaagaatctctttgatggtgttggtagagtccctaaatgatggagcagggattttggagcctcatttgagggagatgctaaaaagattccatggctaaagggatagtttgggctgtggttggagattttcagtatttagagtaatagtgttagctgagaaatataattcaggaccctctgagacagcatctgtacagtatctgatgcacagggacaaagagtggagtgggacactttcttcagatttgtgaggaatgttctgagtagattgtttaaaacatcatttgttgaaaagagaacttttagtgaatcaatcaaggaaggaaggaaggctcagtctcaaaagggtagctgatatccagaggaatctggataagcctgcaaaagtctagctttcaaaggaatgcagaagtatgcatgtggaaaattagaagatttttttttacccttaaagtggttcctatgatagttagaatactgtgactttactatgtgagagagttttcaagtattcacttttttttttaaatgtccaagtacgaaaaaattttgtcagtttgaagtcaggtttgtacagaattgatattgttgaaagtttaaccaaagaatgggaatgaggctctttcacaccctattcagaactgacttttgacaataataaattaagtttaaaatgtttttaaacaaattgagcaatgttgagttgcagtcaagatggccgatcaggaccaggacacctgcagcagctggcaggaagcaggtcatgtggcaaggctattttgggaagggaaaataaaaccactaggtaaacttctagttgtggtttgaagaagtggttttgaaatgctctgtccagccacgcagaactgaaagtccaggctgagaaaaacaacacctggataatttgcatttctaaaataagttgaggattcagtcgaaactggaaaggtcctcttttaacttagtgagttcaatcttttaattttagcttgagaagttctagtttccctcaaacttaagtttatcgacttctaaaatatattcattttcaaaattaagttatgtaaaaaaattgaaggacttcagtgtctttaatttctaatgtatttagaaaactttttaaagttactttattattcttccctctgattattggtctctgttcaattcttttcccagtacccaaagcatttacagtgactttgttcataattttttttaagttagttgttttctgccttactattaagactttagcattctggtcgaagtggcttcataaatctttttcaaggccactttttaggagaaagacatcttttttttaatgaatgcaattatctagaattatttcagttaaacatgttagttggtggttgagaggacactcagtcagtgcagaaggtctgtaagccagtccacagagacattcctgggtgaactccctctggccctgcttcttgttggagaactggccagaggtctgagaccaggctgctgctgggaaggcctggactttggtctcccagtaccgcccagacctggggatgtatggttgtggcttctgccacccatccacctggctgctcatgaaccagccagtcttgatggctttgaaggaatgattccacacaaagactctggacctccctgaaaccaggcactgcaaacggtaagccagcggcagccacagctgtggccgctgtccttaaaccttgtaattgtttctgcttgattgagtcttaagtcattgctttaggaggagaaagagacatttgtgtcttttgagtaccattgtctgggtcactcgcatttaactttccttgaaaaacttataagagaaaaacgttgcctgttaaccattaactacagggctcgtgatactttgagaaaatcttagaaaaaaatgtatacagttgtctggaattatttcaatgaagtgtattagttggggtactggcgctgtctctacttcagttatacatgtggttttgaattttgaatctattttgtctcttcttaagcaccaagtatagatacagtggatacactcactggtttttaacggtggttttaatctagaaggaatttaaactggaggctaatttagaatcagtaaggagggacccaggctaagaaggcaatcctaggattctgaaagaaaagatggttttagtttttatagaaaacactactaccattcttgatctacaactcaagacggtctaatgaattttgaagttactggtaaatatacttcctggttgttaaggaatgattatcaaatggatcagtgcttggatctgaggtcagtgtgagaggacagggcctgggctgtggatatacagaaggaaggccacagctggatagaattgaaaaagaatggagacctgctgctgaggcaagcagatcagccggactctttccagccatagcaaagaaccagattaataaagagaaggccagattaataaagcttgctgagcaaaatttagtgaacaaggttgacagcctggctaggaagctaggctctagttaagcacagttggactgagatgtgtaggcttccctgagcccttcaaaaatgtgctaagctgagatgattactctgaggtagccaaagctggacttgagcaggaacgaggtagactgcaatgagctgaattgagctaggccggctaagctaaactaggctgacttaaccaagatagccaaattggaatgaattgtcttgatctgggctgattggagctaaactctactggactgctctgaactgagctgtgttgggctgtgttgtgctggggtgagctgagctagcatgagctactctgtggtagctggggtgagctgggatgagctgagctgggtgagctgagctgggtgagctgagctgggttagctgagctggggtgagctggggtaagctggggtgagctgagctgggtgagctgagctgggtgagctgagctgagctgggtgagctggggtaagctggggtgagctgggctgacctgaggtggttgagctgagctgggtgagcagagctgaggtgagctgagctgagctgggtgagcagagctggggtgagctgagctgagctgggctggggtgagctgagctgagctgggtgagctgagctgggtgagttgagctgagctgggtaagctgagctgagctgggtgagcagagctgggggtgagctgagctggatgagctgggctgaactggggtgagctggggtggggtgagctgggtgagctgagctgggctgagctgggctgagctggggtgagctgagctgggatgagctgggctgagctgggctgagctgagctgggctgggctgagctgagctgggctgagctgggctgggctgggctgggctgggctgggctgagctgggctgagctgggctgaactggggtgagctggggtggggtgagctgggtgagctgagctgggctgagctgggctgagctggggtgagctgggtgagctgagctgggctgagctgggctgagctgggctgagctgagctgggctgggctaagctgagctggactgagctgggctgagctgggctgagctgagctgggctgggctgggctgggctgagctgggctgagctgggctgagctgagctgggatgggctgggatgagctgaactgggtgagctgagctggggtgagatgagctgaacagggctgaactggggtgagctgagctgggatgagctggggtgagctgagctgggtgagatgagctgggtgagctgagctgagctgggctgagctgggtgagctgagctgggtgagatgagctggggtgagctgagctggggtgagctgagctgggtgagctgggctgagctgggctgggtgagctgagctgggttgagctgagctgggctgagctgggctgagctgggctgagctgggctgagctgggctgagctgagctgagctgggatgagcagggctgggatgagctgggctgagctgagctgggatgagctgggtgagctgagctggggtgagatgagctggggtgagctgagctggggtgagctgagctgggatgagctaggtgagctgagttggggtgagctgagctggggtgagctgggctgggtgaactaaactagggtgagctgggctgagctgatctggttgagctgggctgggtgagctgagctgggtgaactgagctggggtgagctgaactgagctgggtgagctggggtgagctgagctgagctgggtgaactgagctgagttgagttgggtgagctgagctgggtgagctgaactgagctggactgagctggggtgagctggggtgagctgggctggatgagctgagctgggtgagatgagctgaacagggctgaactggggtgagctgagctgggatgagctggggtgagctgagctgggtgagatgagttggggtgagctgaactgagctggactgagctggggtgagttgggctaggtgagctgaactggggtgagctgagctggggtgagatgagctgaacaggtctgaactgggatgagctgggatgagctggggtgagctggggtgagctgagttgggtgagctgagctgggtgagctgagctggggtgagctgagctgggattagctggctgagctgggatgagctgggtgagctgagttggggtgagctgagctggggtgagctgggctgggtgaactaaactagggtgagctgggctgagctgatctggttgagctgagctggggtgagctgggctgagctgggctgggtgagctgagctgggtgaactgagctggggtgagctgaactgagctgggtgagctggggtgagctggggtgagctgagctgagctgggtgaactgagctgagttgagttgggtgagctgagctgggtgagctgaactgagctggactgagctggggtgagctggggtgagctgggctgggtgagctgagctgggtgagctgagctgggctgagctggggtgagctgagctgagctgggctgggtgagctgagctgggtgagctgagctggggtgagctgagctgagctgggtgagctgggctgagctgagctgagctggggtgagctggggtgagctgggctgggtgagatgagctgtgctgggctgggtgagctgagctgggtgaactgagctgagctgagttgggtgagctgagctgggtgagctgagctgggctgagctggggtgagctgagctgagctggggtgagctggggtgagctgggctgggtgagctgagctgggtgagatgagctgtgctgggctgggtgagctgagctgggtgaactgagctgagctgagttgggtgagctgagttgagtgagctgagttgggtgagctgagctggggtgagctgaactgagctggactgagctggggtgagctgagctggctgagctgagctgggtgagctgagctgagctgagctgagctgagctgagctgggctgagctgggctgggtgagctgggctgagctgggctgggtgagctgggctgagctgggctgggtgagctaagctgggtgagctgggatgggtgagctggcctgagctgggtgagctgagctgaaaggatctgggttggagtcagctttgcttgggtgagctgagcagggtttagctgagctaggatgagttgagttggctgggctgagctgggatgaagtaggctaaataagctagcttgagctaaatagagctggggtgagctgtacttaaatgagctgtgattgaagtgggctgggatgagctcagctgaactgggctagctgatgtggatgatggtgaggctgagttaggatgagcatgactgagctggtttggacatgaatgagctggacccggctgacttgggctggttgagctttgcaagatgatgtggactaaactgggctagctggcaggatgagagaggttgaactaggctcagatgagctaggctgagcagggcttaggtgaggtggtttgggatgagctgggataagttgggctcagatgagctaccatgaactgggctgaggtggcctgggagaacatgaatcgagttgcactgagtacagccaggatgaactgggataaactgggctaaactgggttgggctaagaatggactgcctgagttatgctaagctgagctgggatgaattggggattgtcaagacttaaatgagccagactgaactggttggacttgggtgagctgaggggacctgctgcagggccggcatagctgagttgaatttagatgaggaagggtgagctagactgagcaaggctagactgcttatgctgagctacactaacctggcctgagttgggccaggctttgttggccatgtctaaactgagttaagatcaacagggagtctagaggggtaggggatgaactaagatgaattacactagctgagctgaattgagataaggtatggtaacctgagctgaactggaaagagatgtactggataaccttaactgggctgagatgagctaggtctacccaggcctggatcagcttaattagggtaggctagaccaaactgtagcagtatgtattagcctgtgccaagctgggctacattaaactaaactggacttagctaggctcagattagtttcgctactctagatggggtaagttgggccaaactgggatgaactaatttaactagcctgagatgggcagatctgaagtgtagcaaacacagccagggtgaactgaatgagtttgaccaggcctggaccagttaggctaaggaccttgtcctgggcagaccgtgtgctatggtggagtttcatgatgatgccataagagttcccccaccataacccacgtttctcctaccccatatacctgtctggtgtgtaaacctaatctttgtgtgctgatacagaagcctgagcccatcccccttccaccaccacctacctattgctttggaatgagcaaggttatctcagcgaatgtctcaaagggaagccgggacctaggcctgtccctgagagcagatgttcatgcccctggagtggctgccggtggctgaagggccagaaccacctactctagaggcatctctcgctgtctgtgaagtcttccaaagacattcctgtggttagaaggcagccctgctgtggctctgtcccatagaccaaacttacctactatctagtcctgccaaccttaagagcagcaacatggagacagcagagtgtagagagatctcctgactggcaggaggcaagaagatggattcttactcgtccatttctcttttatccctctctggtcctcagagagtcagtcctccccaactgtcttccccctcgtctcctgcgagagccccctgtctgatgagaatttggtggccatgggctgcctggcccgggacttcctgcccagctccatttccttctcctggaactaccagaacaacactgaagtcatgcagggtgtcagaaccttcccaacactgaggacaggggacaaatacacagctacctcgcaggtgttactgtccgccaaaaatgtccttgaaggttcagatgaatacttggtatgcaaaatccaccatggcaacaaaaacaaagatctgcatgtgccgattccaggtaagaaccaacccttcccgaggggatggggagagggggcaggcccaggcatggcccagagggagcagtggagtgggtcttaagccagcctgagctcacacctcaacctttcattccagctgtcgttgagatgaaccccaatgtgagtgtgttcattccaccacgtgatgccttctctggccctgcaccccgcaagtccagactcatctgcgaggccaccaacttcagtcccaaacagatcacagtatcctggctacaggatgggaagcctgtgaaatctggcttcaccacagagccagtgactgtcgaggccaaaggatccagaccccaaacctacaaggtcataagcacactgaccatcactgaaagcgactggctgaacctgaatgtgttcacctgccgcgtggatcacaggggtctcaccttctggaagaacgtgtcctccacatgcgctgccagtgagtagcctgtgctaagcccaatgcctagccctcccacattagagcagtcctcctacggttgtggccaatgccacccagacatggtcatttgcttcttgagccttggcttccaacagtggccaaggccaaggatgagcagtaggcagcagggggatgagagtcagatggagggaatcagcatcttcccttaagcagatttggaagatggagactgagcttttatccaacttcacaactagacacatcacaacctaacacagtgttctcttgactgcaggtccatctacagacatcctagccttccccatccccccctcctttgctgacatcttcctcaccaagtctgctaagctgtcctgtctggtcacaaacctggcaacctatgacaccctgaatatctcctggtcttccaaaagtggtgaaccactggagaccaacactaaaatcatggaaagtcaccccaatggcaccttcagtgctgtgggtgtggctagtgtttgtatggaagactgggataacaggaaggaatttgtatgcactgtgactcacagggacctgccttcaccacagaaaaaattcatctcaaaacccaatggtaggtatccccctttccttcccctccaattccagagcataccctgtacctcacagggagggcaggtccccttctaccctatcctcactattatctttgcttacagaggtggccaaacatccacctgctgtgtacctgctgccgccagcccgtgaacaactgatcctgagggagtcggccacagtcacctgcctggtgaagggtttctctcctgcagacatctttgtacagtggcttcagagagggcaacccttgtcctcagacaagtatgtgaccagtgccccaatgccagagcctggggctccaggcctgtacttcacccacagcatcctgactgtgacagaggaggaatggaactccggagagacctacacctgtgttgtaggccacgaggccctgccacacatggtgaccgagaggaccgtggacaagtccactggtaaacccacactgtacaatgtatcgctgatcatgtctgacacaggtggcacctgctattgaccatgctagcgctcaaccaggcaggccctgggggtcgagttgctctgtgtatgcaaactaaccatgtcagagtgagatgttgcattttataaaaattagaaataaaaaaaaatccattcaaatgtcactggttttgattgtccgatgctcatgcctgctggggcaactgttgtgttatgcttgtcctgcacacaccctgtatacttgcctccaccttggcccttcctctaccttgccagttacatccttgtgtgtgaactcagaaaggcttacaacagagtgtgagcatgccattcctccagctacttctagatatggctgaaagcttgcctaccttggtgcaggcagcattcaggcacatccacagacacacagagacagacatgcatttatacatagatctagagatggacatgtatagatacatgcacgaatatgtattcatagacacacagatagaggttccgcatgcgtgcatggacaaatacaaacaccttcagagacaaatatgcacagacacacaaccacacatggaaacaggcacaaacacacatgatcatgtgtgcaccaaaacagaatataggcaaatatagacaagtgaactacatagacatgaagacatgcatacacagacatgtaaagaaacatcttgaaatgtgtacactaacatgtggacagacatggcacacagttacacctggtctctgaccaggaccataatctccagggttcagggctcagagagtccatactaggctgggtggcactgatactcctcagggtcccactctatgattaggggaaatagcccgaggagcaaaatgtgcatttttggctcaacaccatggggcagaagataccccactaaccacccatgacagaaaattagccttggttgtgtctccattaatagaatacctcaggagatcaatgagagagcgcttgacccactcacttcccagtccagatgcagaagacacaatgcaattgtccaaaagaattgtacacacacacacacacacacacacacacacacacacacaccaacaaaggaacctctataaggagtcaccacccaataacattgcctctttggattcacatcctggacattcttcatattcatatccatttgggacctgggctttagaaatccccaagggctcatctttacagaggtcagagatcccaataaatgccctggtcccacagcctctctatctcttggtaccaagactcaacactgctggcaggggtagaacaatcaacacacaggaactctgatcaaagagaggcatgagatgcctgggtccttcaggaagtaaggagggataacctctgatatgcctactcttattcccaaagcccaggagaagggaaacctgctctgaattctcagtctaacagccccgatggtgccacctgctcagagaaagtccaaagaacacaaaaatcattatgccacatttcctgagtctgcctttacccatgtccgtatgttgcatctgccttgcttgctctgctgccccagagttcctgggacaaggccccaagttagtgcctcctccagtttgacctgtgctttgtctctgtctagcttgagctattaggggggccagtcaattctccagaaccagcagaacacccccaaccctgaggcaaatgttcaatcaccccaaggcttggcttgaccctccctctgtgtgtcccttcacagagggggaggtgaatgctgaggaggaaggctttgagaacctatggaccaccgcctctaccttcatcgtcctcttcctcttgagcctcttctacagcaccactgtcaccctgttcaaggtagtgtgtgtggtggggctgaggacacagggcagagacagggagtcaccactcctcactgcccctacctctactctgtaaaagggaacagcaattcacactgtctctgtcacctgcaggtgaaatgactctcagcatggaaggacatcagagagcaagagaccctcccacagggacactacctctgggcctggggttcctgcctgtatgactagtaaacttattcccacatctttcctgtgttgccctccagctttgatctctgagacgggcttctttctagactggccaaagactttgtccacttgtgcaacctggaacaatgtctggaaccacagacagctgtgctgtatacaaatgtcactttgaaataaatacttcaccttgcgaacccactctattgtgaaggaatttgttcttgttttcaaacttttcctgtggtgttgacatcccaaagactctctaaatagagcctgggaacttgaagtgaacagtctgatggggcttaagagtgaaagagggaaaggaggtgtggaagaagagagagagagagagagagagagagagagagagagagagagagagagagaaaccaccctgacagcaaagtatagcacaggcagccaatgggtagcagtctggtttatccaccctgatagaagaaagtagggcagagaaaactccaggcctgatctcacaaaagcaaccgaatctgaaaagtagcctctagcctggggtgtctgctccatccctcagcccaccctcttgggctggcgttgcttccagctagtgcaatactttggtgttagccaaacctttgtggtatgtggggtgtgccttgggagagttggctgagatctctaggatgtttgtatcccttctgcaacatgacaagccctaggggttagcccataacttgaggactcaaaccctctgtctataacaactgctgtggtcactggagaaggacagctaaaggcctgctcacacagcaggaaaggaaagggaggtaggtcatgtacttcagctcagaggaggaagcacagcagatacaaggtgagggcagtgctaggggttctgctgttcaccgtgtggatggctggaggaacctcacagaggtgggactagctggttacattgagagcaggacctgggagcagggcataagaaagaatatcagacagtgggagggaactgtgtagatgccagggtcctaaagagagtctttaaataagcatgtatggtagcaccttggtgatggcccctttctgagttgggtttctagtgggtagctgcaggagagcaacaagcatctattgagaaaacactgtaaagacgatagggcccaccaccaaattccagatatattttaggcattcacctcaataccctactttccataccagcatctgttttagtttccctgggctgcgggtgcaaagtgccacatgtggcagtttgagcaacagaactctgttctttcccagttctaaaggccaggattctgggcttcagcaggctggttcctctgtgcggcagggagaatgtgtcacagacttccagctctgaagccatagcatttgactaatacttgtctcctggcaccaacaccccagttactgtttcaaatgcatagcccatccccatgtgtgtttcctttgtacttactgccacgtttcacgaacccagttctgctgggtttgatgcccaccctcattcagcacaagttcatctcaggcagattccacccactacgacctcagagctagaagtctatgacacgttctccctgctgcacagaggacactagcctgctgtagcccagactcctggcctctagaactgtgaaagaacagagttctgttactcaaactgccacgtgttgcactttgccccagcagcccaagagagctacatagatgttagtatatgacgtaaggtgcagaggtgactttggaattgggcgatgaacctccaggcagtaaacagcctgctgacctttgcattagctgtgtgactgagatcacatcagttcccgacccccaagccccttcagacgtcacatcaatagagtcaaccgttagagtccatcgctataggaatgatgtcgcttgcactttagaaaggttttataaccaggactgtagttgtaccttaagctttgtgatatgtaaagaagtgagctaattatcaaaaggaaacattctgccaagtgatgttgtacttgaatgtgcccaaaacaaacatcccagcatcaaacgctagtatcttaaaccaacacaggtactgagtcatattaaactgaacgtacttcttgattcacacagacctacactgctgtctctgtttgcggagacccatgcagactaggtactggtgcacatagtcaacgagatgctgagggaggagagcacatactttaaggtagattaaaagggcactggacttggctattgacctccaggccacgctcaatgatgaggcaactaagagtctctgtacagccagaaatgtccccatatgctggccaggtataagatagatggtactagacacttggtgcaagagaaagagagtgtatatgacagacataggcacttgtagacttagtacacagcccactcagggccctaactgtctaaaaatgtgaaggagaatccataactcagtccatgagcattacatacacacctgtagctccacccacctcatcttcacaccttttaacatacagatcatcaggttatatcaggcctgtggcactctgaacccatctccatggctagtctatatccagaatgctgatggaccagcggtcaaggaagcctctctacctaccactctgatgccttttcctcctgagcttcatggtcaaagagaggatccatgagagcatccagggaccaaccacagccctatcagcacatggttctccagccatgtcgtcaactctgtctacccttggttattgctctttaataggtaccttgtctcactgtggcttataggttccatacgtgactatgatatgatagttcttcatctcaggtcctctgagtatcaacattctcacagacctagagcctgcctttgctctgaaagctgtatcttctcaacttggcactgacacagacagcaccctccattcctgtgtattgacccacatcctacccggagatattcctcaagaagcctcctccttaacctatgttcttccccggccagcacaagctcctaaatctgtgtcctgggtctgagccttggacctcataacgtggatcttctgtttacagaggttcaccccagcatcctacactacaattacccagcatgggcacctctgaccagacataaccttcctgattaacaatctgcttcttgttctccacattgcagtctttctgatgaggcccacataacctacaggctcctcacctctttctctgacacttcacaacacattcttccttcccttccattacatactgtcagtgtctctaaacccagagaaacacctggcttttcctagcagtcccaatcattcaagttaaggaccctcactttagtgaggatggccagtcccatgacccttcagaatttgttcccatctacatagttctgaggccctgaaggtcaccctctcccaatatctgtacctaactcctcctgcaaagacctgcaatgagctcctctactctgggggatccactaacctgtgtatcatgtgccagagcaggtttgattacttcattccgtattctcatgagcccctgagaccagaactggaatccctgattccacaatctaaaccatcaggttcccatggcagtccattttagagaccttctggtccgtgcctcttcttaatttatccaaggcattctcctgagtctcagcaatgcttctgtctgaagacataatttcctctacttggacactcaggcagagactcgagcctcttctttaaccgattcagtttggatggcacaccaggcttatcagtgttttcttgagatagcactagctagagacagggacagagaggtttagccaccaaagctggacttagatcacacatgaacaagaggcccagaggctatgaaccctctccaatgagctggtcaggaaagagtgggcataatcactcagcctcagccagctcagggacccagaaggcccaggtgcacagagtaggagcacatccaggcttcctaccttgtcccctgagtctcaagagtaccacatcaactactcccacacatccacatgaactaatctcagtcagctttggactccccctcatgtccagatacagaaacctccccagaataaaggggaacctcaggaaataccttatgccacccactgtcaatcatgttcttactcaatcatagggtggaaatagggtggcattcgcatctctggaacaaaggctgtgactctgggaaagacaagagaaagccaggaacaaatacatctgctttcacagcttccacatgtcaaaggggtcagcactaaatgaagctgcagaagaagaagacctcacagacagccagcatctgtagcccttccagatctttgagtcatcctatcacaggagattgagaaggagttgacggaccagcccaagcagaggaagcctgtgtgttcaacagtaaatgtgtttgccagcagcctgatgtcaactgagaagactgtggcgagtgcttgggagacaatcacgggcagctagagctgcacaaccccatagacaacaagcctgaaacacaaggagatgatgaaatatatccagaagactgcggaatcagtttggcctggaccacaggttgatagaaccaaggcagctgagccctgtggtaagtgaccaggagggcagagggagggagcttccaggagcatgcctgggaatgccttcaggccttctgagaagcagaaagtaggcaccctggggttccaggaaccatcccagcactcaagagttactaagggaatagaagcaaacctgagctgaaggagagaaagaaaagtggagggaagcccaagccactcaaagtaacaggcaggacaacttccagtgagctgagagaacaggagtgctggagaaggcagagcaagcccagcagatcaggagaacctgcataggagtctggatgactagagaaacccagaaggtgagagaacaggcttaacagctgtcatggacttagggatatgcaagcctggggcaccaagctgatctgcatagagggcaagggtaagtgggaatccaagagatctaagaatgaccagcgctgggcagagaggtggcctgggagaagatggctggtcttccccatgagtccaatagcaagattgtcggaataggttatcctatgacagatggcagtatcagtgaccaaatgaagacgctatggaagaattggaccatgtgggagttaagagttgaggacacaaggctgacctgcccatgggaactacagctgataaaagtgctgtgattcagggcatttctggaagctctgtgatccaggttgcagtacacaagtaaactgggacagacgggagttctgggggttcagttcagatactaggaacttaggaaactgggaaaagggaagttggggctgatggcagaactatgagaaggcactggaattctgaagaccagaccttctaatcaactatagaggaaatggagtgggtaggagtggtggatacagctgagcatcacaggggacctggggattggggacagctatactggggctagcagtgcaaacacagaaattgggggaccaaagggggaattgaggatgaccttgggtagatagaaatgctggatgcctaaggtacctccaggagcttagggaacctcgcagagcagctacaaagctggtggtgttagtgacactttcagaaccagatcgggcaggttggcatgtagaaatggggttaatggagacccaggacagtggcagattcagaataaaatacaaacaaccgaaagagttatgtgccctgtaagaagttgatctgacacccacagcagagacatctaaggtctcacagcccacatcaaacaggcttctgatctaaggacagcacaaaaggaaggaggcatcaaaccatcctggggaagacagtgcagtagtagccagaagtgtaagcccaacagcagtgggactggtgtagcagccagggacagggtccctgccaagatgagcctcaggggagctgagcagctgagaaactcaccagctgagaagctcaggggaatcagggtaagtggaggttccagagaatcaggggaagtcaagagctcagaacccaagaaggggcacctgcaaaagagctaaggcctatgagagtgtggggaacactttaagcagctttaggggagccaagacaggtagaagtgtggggacccaaacagggaagctccaggggagctaggaaaggtggaactgtgggaatccaggcagagcagcacctggggagcaaggaaagaagtgtggggatccaggcagagcaggtccaggggagccaaaaagtggaggtgtggagacacaagcagggcagcatctggggaaccaggacaggtggaagggtagggacccaggcagagcagcaccaggggagccaggacaggtggaactgtggggatccaggcagagtagcaccaggggaccaaggaaagaataagtgtggggatctaggcagaacaggtccagaggagtcaaaaagtagaagtgtggagagccaagcagggcagcatctggggagccaggacaggtggaagtgtggggatccaaccagagcagcaccaggggagccaggaaaggtggtagtgtagggtcacaggcagagtcgaaccagggaaccaaagaaagaagaagtggggggaccaggggagccaggacaggtagaagggtggggacccagacagagcagctccaggggagccaggacaggtggaagggtagggatccaggcagagcagcaccagggaagccaggacaggtggaagggtagggacccagacagagcagctccaggggagccaggacaggtggaagggtaggggcccaggcagagcagcaccagggaacgcgggacaggtagaagggtggaaacccaaacagggcagcaccaggggagcaaggaaaggttgtactgtggagatctaggcagagtaataccagggaagccaagacaggtagaagtgtggggacccagacagagcagctccaggggagccaggacaggtggaagtgtggggacaaaaatggggcggcttcagtgtgtctggggagcaaggaaaggtagaagtggagagacccaggcagagcaataccaggggctaacaaggtagaagtgtggggaccagaacagagcagcaccaggggagccaggacaggtggggatgtggggacccaggcagggcagctccaggggagccaggacaggtggaagggtagggagccagacagagcagctccaggggagccaggacaggtggaagggtggggaccaaggcagagcagctccaggggagccaggacaggtggaagtgtagggacccaggcagagcagcaccaggaaagccaggacaggtggaagggtagggatccaggcagagcagcaccaggggagccaggacaggtggaagggtagggacccagacagagcagctccaggggagccaggacaggtggaagggtaggggcccaggcagagcagcaccagggaacgcgggacaggtagaagggtggaaacccaaacagggcagcaccaggggagcaaggaaaggttgtactgtggagatctaggcagagtaatgccagggaagccaagacaggtagaagtgtggggacccagacagagcagctccaggggagctaggacaggtggaagtgtggggacaaaaatggggcggcttcagtgtgtctggggagcaaggaaaggtagaagtggagagacccaggcagagcaataccaggggctaacaaggtagaagtgtggggaccagaacagagcagcaccaggggagccaggacaggtggggatgtggggacccaggcagggcagctccaggggagccaggacaggtggaagggtagggagccagacagagcagctccaggggagccaggacaggtggaggtgtggggacccaggcagggcaccaccaatggccaacaaggtagaagtgtggggacccaggcagagcagctccatgggagccaggacaggtggaggtgtggggaccaaggcagagcagctccaggggaggcaggacaggtggaagggtggggacccaggcagagcagctccaggggagccaggacaggtggaagtgtggggacccaggcagagcagctccaggggagccaggacaggtggaagggtggggacccagacagagcagcaccaggagtgtcaggagaggtggaagttaagtagttataggggaacaggggcagaatagaatgagggatgcaggctgagaggatacaggggaaatgtggcaagtggaagggcaggaagagaggcagagtggctacagggaagttgaggcaggtaagactgtctgttccaggtcaaaaaacactgaagaccagtagaaaggaaactggtgcatgtggtagtgggggattcttagcttagcagtcacagggaaagtgagccaagtaggaatgcaggcatggggggcaggcacagctgagcaaacactaaagagctgtagctgaagggttataaggtaccaagctgagaagctgctgggaatctggagctaatggggtgtgggggagcaggctgagcaactacacaggatcagggataggtaactgtgtaaggaggcaggctgagcatctccatgacagctggagctactatgaatgttaagctccagactgagcatctgcagggaaacagaggcaagagggagtgtggggatccaggctgagtaggtccagggaagctgtagtaggtggaggtggaggcccaggctgaggagctacaggagagatgggacactagggagggcagggatcatggccaagcagatactcagtagctgagatagatgtggggaatcagcttaagcagcagacacaggggagcaggatctagtcagcttctagggatccaggctgtgtagacatggagggactgggggagctataagtaaatacactaggcataaaattacagggaaacggaggccagtgggaacgtgggcctcctactgaacaagtaacagagagccagaactgacgggttgaagaggaaccaggctgatgagctccaggaaatctgtggggactcggtcaatgggagaacagggtgagcagctatagaggatcagggataggcaaaaacgtatggagtcaggctgagcagttacatgagagctggagccctagttatgtggaggtccaggcagaggggctggagggtagctgagggaaatggtgctagagaatcaggctaggcagacacaggggagcaggttctagtctacatatgagtggggatccaggatgtgtagagaaaggatagcaaaggtcatggaggattccaggcttaggggtcactgggaaactaagactggtggaagtgggattgtcctaagtgaacaaattccatgaagctagagccagtgggtgtaaaggtagcagactgaaggactatagagtatctgggggtggatgggaatgtggggaatcgtgctgagccactacaaggacagtgtggctagcaggctgtaggagaccaagctgagtatctgaagggaaaccaagggaagtggaagtgtaggattccagaaatgagcaaatgcagggcacttgaggcaggtatcagtgtagggaacgagactgagcagttcacaggtcacccagggtaggtaagagttctggatcatcagagaagcctctggaagccctaagcacctacagtagacctaaggcaggtggggtgcagggaataagttgtgcagctcctgaggaggaggacaggttggagtagaggaggttctgactaaagagttgaatgggagcagggcaggtgggaatgtagaggaactagctagacagaagtccagatgagattgagggccacatgatgccctgagccgatgagctggccttagaaatcactctgctgggaccagggccaggggtttgaggaacaaggctgaggtgaaatggtagcatgacagggaggcaatggcagagaggaaggagaaggcatgcttaattcatggtggagtgcagggagggaaagagccaggaggtctaggctggagctgatccagctttctgcactgatgagaggggcgggactgagttcttttggctccaggagccagggcaacaagacaaaggcgcctagcatagcaaggacacatctggatctaagaccaggagaagagggcaagaccgaaagttcaggaggtcatgggagggagtgggaaatctacaagggactgtctttagaaaagagtaagtgcccagtggagggagtgcccaagcaacaagtccagtgttgggagagatcggggtgggcaaaggctgtatgtgcagtaggcaggcccaagtccccaggaaggaaagaagaagtgcataggaaaacgggtcaggtctagcaggagccaaccgaggtgctcaggactgagaggcagagcccaagacacaggaatcgctgagctcatgcaggtaccaagaataactgagagctaagagaaaaattatctagggaatagggggacatgaggaaggactgttggctgagaagggaaagggacagggagaatcctaagggttggcatagacaaaggaaacacacaggctttgggttgttagtccggggctctgcatatgatccaccgagattgtggaaacagaagagcaggaagatcaaatctgtcccaactatacagggacacacggtcaacctacaaaaggaaggagatgtgaggatcaggggctgagcagtgaggaggtgtgtggaggtgttagagctcaggtgcagcagagactagcatggccctggggatagagggaaggacccaagggacagtagggacaggagggcgaggtgaggtgatgaccagcattatacaaatggtggcgctgtccaacttctagggccctgtgctactgagaaaggaaagggacttccgaggtttggcaatacaagccccgtgcaaaggcagaacccagggcactgtgaagacaacactgcaagacaggagaagccaaggctgagttcaccgaggtcacattagtgagaatacactgcgaggagaggggaggcgctgagcacccagccacaccagacaggcccatgctgagtccctggacagtgggggaggggagcacctggtgacctgtaagaactgtgagactggaggagaaccaaggtaaaaggtgtgtcaaaggacacatgtttagcaggctgggccgacttaatgcaggacacacgtggtggcaaagccaagagggctgcgtatgagccacaagtgaatcctgacccaagaatagagagtgctaaacctacttacatcaaagccaactgaaaggacaaggccagcaaaacgaagctaaggccagagatcttggactatgaagagttcagagaacctaggatcaggaaccattagtgaacagacaaaggcaggtaaagcagcctaggagtggacaaagacaggagaatacagaagacggcagggatgacccgacttcagtttgggcttcactgttgtccaaactgtgtgcagattatggcccatgggtaagaggtttagcattagaacacagatacccacattggacaatggtgggggaacacagatacccatactgcaaggctcttcgggccctttcctaaaagtgtactaggagtgggactgggctcaaagggattaggtgtgatctggcctggtgaggctgacactgacaagcccaatggttgggtgttgcatcctccatttatacagccagggacttggggagggtacaaaatggaggacttgtaggagcttgggtccagacctgtcagacaaaatgatcacgcatactttttcttgtagctgaaacaacagccccatctgtctatccactggctcctggaactgctctcaaaagtaactccatggtgaccctgggatgcctggtcaagggctatttccctgagccagtcaccgtgacctggaactctggagccctgtccagcggtgtgcacaccttcccagctgtcctgcagtctgggctctacactctcaccagctcagtgactgtaccctccagcacctggcccagccagaccgtcacctgcaacgtagcccacccggccagcagcaccaaggtggacaagaaaattggtgagagaacaaccaggggacgaggggctcactagaggtgaggataaggcattagactgcctacaccaaccagggtgggcagacatcaccagggagggggcctcagcccgggagaccaaacattctcctttgtctcccttctggagatttctatgtcctttacacccatttattaatattctgggtaagatgcccttgcatcatgacatacagaggcagactagagtatcaacctgcaaaaggtcatacccaggaacaacctgccatgatcccacaccagaaccaacctggtgccttctaacctatagacaccaataacacacagccttctctctgcagtgcccagaaactgtggaggtgattgcaagccttgtatatgtacaggtaagttactaggccttaaattccagccccaggtccaacaaatgtcctctgaggcccatgttggaggatattggcatatttccacctttcttcttcatctacaggctcagaagtatcatctgtcttcatcttccccccaaagcccaaagatgtgctcaccatcactctgactcctaaggtcacgtgtgttgtggtagacattagccaggacgatcccgaggtccatttcagctggtttgtagatgacgtggaagtccacacagctcagactcgaccaccagaggagcagttcaacagcactttccgctcagtcagtgaactccccatcctgcaccaggactggctcaatggcaggacgttcagatgcaaggtcaccagtgcagctttcccatcccccatcgagaaaaccatctccaaacccgaaggtgggagctgcagggtgtgtggtgtagaagctgcagtaggccatagacagagcttgacttaactagacttctgccctcttactgacctccatgctgaccactctctgtatccacaggcagaacacaagttccgcatgtatacaccatgtcacctaccaaggaagagatgacccagaatgaagtcagtatcacctgcatggtaaaaggcttctatcccccagacatttatgtggagtggcagatgaacgggcagccacaggaaaactacaagaacactccacctacgatggacacagatgggagttacttcctctacagcaagctcaatgtgaagaaggaaaaatggcagcagggaaacacgttcacgtgttctgtgctgcatgaaggcctgcacaaccaccatactgagaagagtctctcccactctccgggtaaatgaccccagagtcagtggcccctcttggcctaaaggatgccaaaacctacctctaccacctttctctgtgtaaataaagcacccagctctgccttgggaccctgcaaaaatgtcctggttctttctgagatacagagtccagcgaggtcatgggctgaggggcgtccagggtttgaggcctgaggtttgactaaggaaaaagggtgatctacactgccagacacagcacttttgatttgctggcatgaacagaatttacctctcactgaaaagtggaggctttatcccgaggcaatccctcttgctttctcttcctctacctaatacatctatagtgggcacagaatatatcatgaaagtaaggacgacccaaactccacctccctagtccacctttacccctcttcctagccaaggatcccactgaaggcactcaatggacacatatggtcacagacagacccttgctattccaccactcaatgcaagaagcgttccagagactaagtctaatgtaacgatgcacatagctgtcactgctctctcactgcccatgagaatcaacatggacccattagacacaacctgatgagcaacactgagggcaaaaggcccatatgtatgcatgcacacacatcttcaaatgcacagcacagtgacacacacacacacacacacacacacacacacacacacacacactggaacctcacatgggcatcctgtgcagtactcccagatgaaaagaaaccaggtctacacacaggatcatcccaacattcacaagtgggccagctgagacagatacaacttttctctgccttggatgcccacagacatcttcatgcacacatgagtttcctggggtcaatctgtccctgaccctgggatggtgccccaacctcacacagttggcacccatccgaaactgtataacttactcacttcccactgtggatcttaactgcagtcctagcatcatggggaatcagctctgcaatccctctggccctcagttctcggtcatcagcagatacaggatcaggcagaccacacagacactacccatgagaggcacaggccctgactcagcctagccaggttcagaactcaaggctggagcacacacagaatgacctagtgtataggccaggccaccatcaggtccagggtgtctggtgagctcagggacaaaactacagcactttggggaactgaagtttctggtccagagagagatcagaaaggagagatggcctcagggagggtctgctggcccagtcaggctgtaactttctcctggaactccacacaacctcatctgacacagggaatggccctagtcacgccgtgttgggataaacaaacgctgacttccctctctgtccagggatggaagtggacgatgcctgtgctgaggcccaggacggggagctggacgggctctggacaaccatcaccatcttcatcagcctcttcctgctcagcgtgtgctacagtgcagctgtcacactcttcaaggtcagccacaccatctccacagtgtccacaccatcctcacactgttcctcatactgtctctgtgatcagctatgccccacactgtcccatgctattgacctgtcttacatgctgggcaatgccacctaaccttctctatgatacagtctcacagtgtcccatgcagtctccctaattccccaagatgtccgcactctattgctgtgttgcctcatgctgcccccacactgtccatccctccctggtatgctatcccaggctgttgtctctattttcatgctctcctcacactgtccctagtgtctcatactgccaatgttggctcccacattgtccccacactctgcacacaaccggacaataaaccctgctgtcccataatgttccctgtggtccccaactctatccctgcacatttgtctatgttccctgaattctcatgttgtttgcacactgttagtgtctaacgaactctctcccaggtgtaccttcttccatgctgtctcacctcatctcccattctgtccttgtactaaccccactctatcacgacactgtccctattcactgtccctatgaagtgcccatgctgtctgcattctgtcccatgttgtatcctcatcccggtctcatgcagttcagatctatctgacactattcccactctatgcacacatttccccctataccatccctgtctgatcaacatgcaatcctctagacacccatgtagcaggttagagactctagggatgggtacctgcctgactgagctacctctcttggtgggagaggaaacacaggtgagagtgcagtcctgatcttatcttattcaccctgtcccacaggtaaagtggatcttctcctcagtggtagggttgaagcagacgctggttcctgaatacaagaacatgattggacaagggccctaagccacctcctataatggcaaaggattccccacgccctagaggaccctgtccaatgtgccaagcagtctgactcagatcacactgtctgctcacttcactatcttctgtctatgagacccaacctccctcaattcttctctctctggaggactatgtggacattagatttccacaagccacagcctccaggacctaaaataccatcacagcagcagccaggacactagatagggtcagaaggaccatagtttcctgactagtttatccaatctgttgggacagaagaatcactgaaaaagtgacaagtgcccaagttgcctgtgttcagcttggaagggaccaaccttggaaccagtcctgtcagcatcatcttctaaaacacaagaattgagtatgtaaatggcagattttggatccccagggtaagacagacttcaaccaggccacgacctgggcaatcatggcccagctgaagttgactgaattattccagtggccttcacatcgtcttgccaggttccttcttaccacttccatgaaccctgggatacagaaaagaactgtgcttctcgggatcttgggacagaactgtctaattggtgggatccttaggtagatctttcttccagtcacgggtataatacaatacactagattctcacataaaggaaaaaattcacacacaactccggccagtcctgaggcctagacaccaccacctctctggaattctgagctctatgctggaggcacaagagaggaaggcctggacttcatggcctctgtgtagccctagtaggtgcagaggcccctaagccggggttgggtgaccagcaaggacctcctggagagggatctgatgagtagattccacctgggacagaaggaaaaagatgaaaagcaacagaggtggaagggcactggagagagccatggtatagcaggtttatcttgcagacctgacatctgtccatgactctgagacttagctaatgacagctggggcagcagtccaaggaattaccatgccccctaacaccaggctcctggagtgtggagtgggtctactccagagctccaatacctgtttctccatcacttctcagccaatgagaaatcggtttccagacaggaagaaaaatgaaggcaggaaggaaaagtgggcacctgttcttctgtgagtggcaggaagttctcaaaagactcaggactttggcttctaacttcctgtggatcattgatgtctctaaggtctctgtctgctttgttggttttgtttgtttttggtttggtttttttttttttttttttggtcaataaaacgttttttcaaacattccacaatctctgtgttcttcctatgtgaaccagccctggtacttagaaacagcactgttaagtagaccagtgagtcatgaagaacatactacctctcctggtcctgtgtcctaccagttctcctctaagggtcccttcacagctgtgtgccagctctgctatcctataccagataggtcctccgtctttcttccctatgggcagtttcttcccagccagaagctgcctttgtcctgtaggttgcccactcatggcctcccacaccagccacacaaactaagaagcaggtgtctcagtgacctcaggctcagtgataacatttctatggaaaagtgaaggaataagaaagagaagaaatactccagagtcagggaagagaaagattataagggatgtttgctttctcaagtatgtttggagaagttccagatcaggcgttgacaaggtcgggttctcagcagggctcttcttgcctggtaggtgccttctcctccttgtgacctcacaggctttccctctgtgtgtgtctctgtcttgatctcttctcataagtacacagtcaggctagaagaggtacaccctagccctaattataacttatcagtttatgaccctgtctgcaaacataggtcatggtggcttaaatgtcatttgctgaatcttctggggacagaatttagtccacatcagctctccctatggaccccaaaagttcatatccttcccacatataatgtccctcaccccatacaaacaccccaaagtctcacccttccaccatcagctctgtctcaattctcctccaagactgctagttaggtaagtgtgagatgtgggtgtgactcattcaggatcaagttcaagccatgactgtcaggaaagaggtttaggccgtcagcgcagagcagattccaggaccatctgagcagttgctgaggttcaaaggcagattatagactgattccttgctatagagaagatagcccattgtgatcctctcatactagttcagtgataacaattctatggaaagtgaaataataagaaagagaagaaatactcgagtcagggaagaaaaagaacctgcaggggctgccaattgtctcttgttctgctgggcgtgtctgtgccctactagagttggattctgtcttcccatggagacaaggagacaccggctccatggcctgagatagcaccgtagaggggcccagaatttgcttctggaatgtaggagtgttagcaccaatggagagctaaggtacacaaaggcctcctaagcaaagacccaaaaacaggagctaggtgctaagtgtgcagttgagttctcagatggtgtttagatgtcctcaggtatatccttgactgttagagactgttcaagccattatgacctctagtgatggctatatgagggaaatcaactgggctggactggtcaagagaagatcctgtcaccacagctacagtggtgaggggctgggtggggggcagaatccaaactggccaatgccattacagtttctggtatagggaaagacatgcttttcctcggacagagaagcagcagatccctgtgagtggtattgctgctggggaagccatagggagatggacctcggagggatttgttgctcatgtgcagacagctgcaaggagcctgggctttggccaagcacactgggcagccgctacaatgctacacactttgggagttaggacagtggaacctagactacaaagaggacagctgcactaaccctgagaaaagttacttaattcttcacaaacctctgtttaatgtgtgaccaaacatccctccctgcaaagcgagggaagaagaacatagaatagtgaatttaaagaacatttaggcctgggacagtttccttgctcagataagaggaaatgtttgttttatctcatagttcaagtgtacagtctgtcacagcaagagtcttagtttcatttctgttgcaatgataaagtaccctgaaaatagcaactttattcagcctgctgtttaaggttacagtctatcaccgtgaaaagtgagagcaggaacttgaggcagccagtcattcacacaatcaggaacagagagaggggtgtgcacgtgcccactacccagtgacacgtgacgttagaaaggaaatttggtggggataaaagaggaaatggaggagagggagtagggacggattttatatattacatgtattatgaaattccctaacaataaagagagctacaaacggctcattaggagaaggtacaatgtgtgaagctcttcagtgggttatgaagtagggatggtgaagcccaggtgcactgaaaatgaatttaccccagaagccgcccttcatatgtgcaccatgacatgtgcacgcacacacatgtacacaattatacatagacacattcaacataaacacaacatacatgtacatacaccacaacaccacacacacacacacacacacacacacacgaaacacatacataaacacacacaatcattcatggacacactcaacataaatacaacacaccacatgccctcatacataccacacatacacacacacatgcacacacacacacacaaaacacatcaatacatgcaccaccacacacataccacacacacaccttcatatacaccactcagcacacacagagacacaaaaaaaatacatatttacacaccacacacacatacataaacacacacaatcatgcatggacacactcaacataaatacaacacaccacatacactcatacataccacacacacacacacacacatacaaaacacataaatacatgcaccaccacacacacataccccccaacacacacacacacacacacacacacacacacactagaacacactaatataataatgtttaaggactgcatcatttttctatctttctgcaggcacttgtctgaggtgctgaatgttttcatgctcccatccttgccaaacagcactttatgaggagttataaccatgccacagcctcagtgtggtgctgacttaaaagttcctccaccaaataaactattccattccttccgaaaatagccagatactttcccagaatgtaatacaggtcatcaggtcttgatgagatcttgtctccccaccctgaaacctcatgagctggatccttgctgtccttaccccctttttaatgttccctgcactgggctttctcgtcccacagcatccatgtaagttatcctgaaagatgccacatcctttcctctgctgacaaatctgtccaccttactgtttaagttcctagagtaggtatattctgagaaagtacttatttatatccagagaatatatacatttcacatagttccttttgttctggttattgatgtcattgggtcctgaagttgtgtttggaccttacaatgacaaaaacccatctttccctttcttttaccaccaattctatctcatctatctccctgtttctctctgtccatatctctgtctttttctctgtgtgtgtgtttctgtgtgtgtgtttgtgtttctctctctctctctctctctctctctctctctctctctctctctctctgtgtgtgtgtgtgtgagagagagagagggggggggggagacatgtgtgtaggtgcgagtgaaggtcagaaaaggcatctgatccctgaaacgagaattacaggaggttgagaaccacctgaccagttacagagaaccaaaatcagggtcctgtacaagagcaatatgctctcttaactgccccgacatctctccagcaccccagctttcttctgaggtcttgtatgtcatacataatgaactcagatagggcacacccagtgtagctcagcgtagccagtacagccacagctagagatttgaagaactgggccatccttccagctgggcactgtggcctggtttctgctcaattagagcttcaatcctcaagatgaaggaatcgagtctgctgggccatggagcaggcctgagtgcttgctctctgtgggcaagcatgtgtcctgtttgttaccacagctagaaacagatgcttctgctgagaagctgcctgcgaggaggctgttgatgcagagtcgtgaagcgtggcgaccgcggcaacccacatgacaaggctgacttacagactgtggcttcagtgctggggcaaacaacaaccaagaggtcctacagacactccagagccacaaggtcaccacatgtctggagcagatggatttcagtcaacacttctaccacccaagaagcttttgtggtgctgggtatagatgaactcaagtagcaaggttcgggctgtgcttgggaatcccggcaacagaagggtttgctggagtggtaccacaagcattgctgtagtgcaatttccatcttctatgtggagaaaagcccaagtacagactgtcaggacaaaaccaggcagcttccatccccaaaactgcccatgagtctccagccttggtaccctatggcctccgaaaccgcccaggggtgtgtgtatgtggtctctaatgaaaaacatcaagccaaaaatccagaaaggaatctgggcacaacctcccagtggccacaatccttccaggaagattttcttcagtaggctgaggtaaacagtcttacggaaagtgccatccagtatctccagtggtctggaagaccctgagaaacacttgctgaccaacatggtcatttgtctactcattactgcaggcgtttgttttttaagtgtgcatccgcctgcgcgtgcccgtgagcctgagcgtacgcgtgtgcgtgcgtgaggtgcggtgcggtgcggtgcggtgcgtgcatgcgttgcttgcgtgcgtgtgggcgggcgtgcaggcgtgcgtgcatgtgagagagagaacacatgccgcaggacacaaagaaaccagaggacttgcaaaagtcagttctctcaacaggtcagtcctagatacggatcttcggcagccttacccgctgagccaccacactggcccattctttcagtcatttctccatccatctggctctcctgaggtgagaaaccttggccctccaatccttgcagtcagcattggaagcagattgacagtgatgggcacataggagagggagcagtgccagatgacagggcaccgggagacattgcccatatcttacaaagggtgaagatccaaggactggtttgggagccttaggggatcagccagggcctctggtgtagcagagacccagcactcctggtcaactgtacctacagaggtttaatcatttctctttggtaggctgctatgaccaatggatgctttgaaaggtctgtactgacctgtggggctcacgcagaactgggcctagcaggtggggtttgaagtttggcagcctccgtgggaaggatgtgaggaggtagacaatgctctggagagactggagccctgaaaggggggcactggatgtttgctgctcagattgggggtgatggccactcctgggtcacaaagaaaggcagggacttctcatgggatcactcaggaaagagatctggagaacctggaaagagagattatcaggaaagtactccaaagccctctgggagcttttgctgagtctctaggttggtaccctaaagcttgccagggccacaaacctctcttggtgggattaagctgctgcaagggtcccagattttttttctttcacatttgagttgttacttatgggtggcacataaaattactcttgttttcccatcaacgtcgtagggtaggaacccaagatcggagaactgatttcttccatatagtcccaaattcacacccaagtgacttgcttcctctcttagctcctcccccaccatcaccacctcccagtaacactgtcatgctctggatccatcaccaagggcttgacccgatggttagttcagagcactcacgatctcacagtctctggaaagtcctgcatagacagaagtcccatcacttaatccactcgaggggacaagcaaatgaaccgtctcatcggaggatgaagaatcttactaccgggtcccgacatcagcttccatcctgctgccttgtcccaggaatgtcagacttaacacccacgtttccaacccaactgcatggctagtcccttaaaactcttcattccctccccagtctctctgcatctgtgtccatatctgtctaaagaaccatccttccgcaattggagctgtggccataaattttgcgtgtgtcatttatcggttgtttatgtcaaccatctcccttctctgttcctgttgtctgcctatcacctccatcctcatcaccctctgtccctatcatatatatatatatgtatatatatgtaaatatatatatacagttgatatgcaggaaatatatattcagtttatatgcaggatatatatatgcagttgatattgatatgcaagatatatatacagttgataggtaggatatatatgtgtatatgtatatattgtatatatatacagttaatatgcagaatatatatacagtttatatgcagaatatatatgcagattttaagtggactagcaagccccgagccctcaagaaccgctaggatccctgcccagtcatgttactgtcattggaagtcatcttctgtttccactccaccaccacagaaaagatccacttcatctgttgggcagggtggttgaggagaaccaagaccagggccctttaattctgtggaggaaccaaagacagctcctgctacataggagcctgtccggtggtatggggaccagggagaagttagaggtgtggaatacagggatagaatggtgtacaacgagggatcatggtgtaagggagggtactgtgaggacagtgtgtgaacagagtgtagacagtgagaagaacttggaggacagcatccgcagcatgggagagcaaaggaaggtgtgacgacattatgaagatattgtgggaactgcacgtgagtgtgaaagacagcatggggtagcaagggaggagctgtgggacactaagtgtataggagggaagtagcatgagacgctctagagcagttgttctcgaccttcccagagctgtatcctttaatacagttctcatgttgcggtgacccccagccataaaattatttcattgctactttgtaactgtaagtttgctaccgctatggagtatattggaaatacttgttggtatgcaggatatctgatattcagagtggctacccatggcataagaaccactgtgctaagtgggtagaagggccaccatggaaatagcatggggacactagaaagacagcatgatgagagtattgtgatagcattgggatggtgtggggtcttgtgaggatagggtggggacagaagagtagacagcataggtcgtcacagggacagtataggaacagtgtgaggacagtgtggacactgtggagatgttgtggctgaccttgaagagtgtgacagctgcactgtagtacacactgagcaggaagaggctgatgtagatgatgatggccgtccagaccccgtccagctccctgtcctgggagtcagcacaggtcttgtccagttccagccctggacaaagagggtagtcagtctctgtcccaacaaggctgggacaattccctctatggcaggtgcatcagcaatgaggtacccactggactgggccagtagattgtttctggggccagccttctgccctctccagaccagcagactacactctcccaactgctccaacccaagtcccggactcagccagacacaagatggcaatctggactgtgtaagaacccttcccacctgctccactcctcagatttggggctgtctgggctgaatcagagcctgtgaccactgaccctctgcctatgaccaagcccagaaagccagtgtaatggtggaccccaggcctagtgatgcctggccttcagagttccacactgggaagtgaattgggccactcagctatgtgggaaggggactgtcatctctatgggatgaaagcatgggtctgaaggtccagaagcagaatggcatgagagagtgtgtattgtgggacaagttgcctttggaatcctttggcagtgctatctgtctcagctgagccagatgtgaggaagagcctcagagaaggcctggtgccttgatgggtctgagttctgtactgggagctcctatgaggtctcggagtgtaaggcttgtgtctgtgctcatgcacaccagtgtacaagtctgtgtaaatgtcatgtgggttgaccgatggtcatcagactgctaggcactggagtcatctgatggctctgaattctgcattctgtgtcttcaagataagagacataggtatctagcccagaaaactagtctcaaggaggagagagggtcatggcaaaggtagacagacagaaattccagtgctttgacctgagatcctctccctgggcacaactgttcatcctggttgatctagagaagaaaatgacataagcctgacctccaatgggccatacctctgctgagcatcctctcatcagttttcctgtccatcttggtactgctgaccagatgggtcacacacaggtaatagcctggctcgtccagaagctgccaggcatgatcactgagctcctgaaggaagacagcttgaactataagacagatgtcgagtttcacataccagtgaacaaagctccagacttccaagacatgattgctggctcagggaagtagcccttgaccaaacaacccatgttgccatgggaaccaggaaagagatggacagggccatggctcttgctgcaaaggggggaagagatgtgaacatactgtccagcctggagaagtctttttctccatgcagccctgggtcttctaagatgggatctgctcctactcttcacgaacctagccagtttctgttttctctgaccccagcccctactcttagtctcaggaccttgcttttcacccccatccttacactgtaccccagccctgccagcatcgaatctggtcccaatgggttctttccttccaatctatagggttaactcccctgagcattcccactctcccctgttcctgtgaggccccaggatcagaattgtggaccacaaccccagaaataaaacccatggaatcccagcccccagagaccctccctgtgcacggcctccctcagtttagcaaagagttacttctggacccctgcctagcttctctctgcagccatatgacccactgcttataaacacagccagaagcgccagttccctttctcctctccacctggcttcactctgcactctgtactctcactccagacttcactttcctcctggagccacagacacttctgggctctagagagattgcatcagctggagagggaatggcagaggctgccaagtaggctggttagaggtcagacctgagagaaggtcttctccaaaaaggtggtcaggagaatggacataatcactcagccccaagcaatccaggaacactgggtgacagctagtctctacatcttcttctaagggtctcaagaggaccacttcacctacccctacaggaggtaacccagaccatgtctggactccccctggtctccccctaccccaaacactgaaaccaacagaagaaagaggaacctcaggaagtgtcccgtgtcacccagtttcgatcctgttcttagtctgtactgggttgggagaagtgtgatgttcacacctctggggcaaggactgtgaatcctggaaggatgagacagatctcagagctgggctgttagcagcccagcaccaatgcaaaaagagcagcagtcacaaggttccacacgtgaatgtagtcagcagagaagctggagaaagccacagcctagggagagcagtgagcttttccagacctaatagacggcagaacacaggaggatgaggagttgacagatcagccccaacagaggggcctgtctgttgcaaagaaaaggtgcctacctgcaacctggtgccaaccaggcagacaccagactttccacggacagaagccaagaccactaaagccgtgcccacctacagacaaccagagtaagcctcaaggagttaatgggatagacccggaaacctgagggtctagccaggcctagaggccggtggacccaggacagctgaaccaacagagaaaagaaaacccagtggagcaagggcagaggcatacagaattgagagagttggtaaagaggggatggggaacgttcacctgggaggactgatacacctattagaaagagctagagtcagagtggatgcccttgtgactcccggcattggatagcagatcccaagaacaaagctgaaagaaggtaaatttctcaagagaaagtcttccagaggaactatgggtaccaggcaataagtagtacatccgtaggagggaaccagacagtagtacatctgtaggaggggaccaggcagtacagctgcaggtagggaccaggcagtatatctgtaggagaggaccaggcagtatatctgtaggaggggaccaggcagtagtatacctgtaggaggggaccaggcagtatatctgtaggagaggaccaggcagtagtatatctgtaggagaggaccaggcagtatatctgtaggagaggaccaggcagtagtatatctgtaggaggggacaaggcagtacagctgcaggtaagctaaggacagtaagagtagtagagagccatgatgactccaaaagctcagaagacctggcagagcagctacagggaatccggggctggtggagttgggaggaccaagccaaagagctataggtaagccgaggctggtgaaggcacaaaaacaagctaaggagctacagagggggcaagggctgtggcaggtgtggctaagagaggtccagggcacccccaggaaccagaaagagctttacaggagttctagaggaggaaggagttggggagacaggctgggcatctgtaaagataaggtagcagttgtcacagtttgggtctcagagctgcccaggggattaggggaaaattctgagaagctgtgggagagtaggggatggtaggaatgtggaggaccagtcctagcagctgtggggaagctggggatggtaggaatgtgggggatcagtcctagcagttttggggggagctggggatggtaggaatgtgggggaccagacctagcaattttggggggagctggggatggtaggaatgttggggaccagtcctagcagctatgggaaagctggggatggtaggaatgtgggggaccagtcctagcagctatggggggagctgggatggtaggaatgtgggggaccagacctagcagtttttgagagctgggaatggtagcaatgtggggtccagtcctagcagctatggagtagctgtagatggtaggaatgtgggggaccagtcctagcagctgtggggaagctggggatggtaggaatgtgggggacaagacctagcagctatgggtgagctgtagatggtagaaatgtgggggaccagtcctagcagctgtggggaagctggggaatggtagaaatgtgtgggattgttcctagcagctatgggggagctggggatggtaggaatgtggaggaccagtcccagcagctatgtggggggctgtggatggtaggagtatgggggaccagtcctagcagctatgggagagctggggatggtaggaatgtgggggaccagtcctagcagctatgggagagctggggatggtaggaatgtgggggaccagtcctagcagctatgggagagctggggatggtaggaatgtgggggaccagtcctagcagctatgggagagctggggatggtaggaatgtgggggaccagtcctagcagctatgggagagctggggatggtaggaatgtggaggaccagtcctcacagctgtggggaagctggggatggtaggaatgtggaggatcagtcctagcagctatgggtgagctggggatggtaggaatgtgggggaccagtcctagcagctatgggagagctagggatggtaggaatgtggaggaccagtcctagcagctatgggagagctggggatggtaggaatgtgagggaccagtcctagcagctatgggagagctgggaatggtaggaatgtgggggaccagtcctagcagctatgggagagctggggatggtaggaatgtgggaggcctgtcctagcagctatgggagagttgaggatagtaggaatgtgggggaccagacctagcagctatgggagagctggggatggtagtagtatgggggaccagtcctagcagctatgggagagctgggaatggtaggagtgtggaggaccagtcctctcagctgtggggaagctggggatggtaggaatgtggggggcctgttctagcagctatgggagagctgggaatggtaggaatgtgggggaccagtcctagcagctatgggagagctggggatggtaggaatgtggaggaccagtcctctcagctgtggggaagctggggatggtaggaatgtgggaggcctgtcctagcagctatgggagagttgaggatagtaggaatgtgggggaccagacctagcagctgtgggggagctgggaatggtaggaatgtgggggaccagtcctagcagctatgggagagctgggaatggtaggaatgtgggggaccagtcctagcagctatgggagagctggggatggtaggaatgtgggggaccagtcctcccagctgtggggaagctggggatggtaggaatgtggaggaccagtcctctcagctgtggggaagctggggatggtaggaatgtgggaggcctgtcctagcagctatgggagagttgaggatagtaggaatgtgggggaccagacctagcagctgtgggggagctgggaatggtaggaatgtgggggaccagtcctagcagctatgggagagctgggaatggtaggaatgtgggggaccagtcctagcagctatgggagagctggggatggtaggaatgtgggggaccagtcctcacagctgtggggaagctggggatggtaggaatgtggaggaccagtcctagcagctatgggtgagctggggatggtaggaatgtgggggaccagtcctagcagctatgggagagctagggatggtaggaatgtgggggaccagtcctaggagctatgggagagctggggatggtaggaatgtgggggaccagtcctagcagctatgggagagctggtaatggtaggaatgtgggggaccagtcctagcagctatgggagagctggggatgataggaatgtgggggacctgtcctagcagctatgggagagctggggatggtaggaatgtgggggaccagtcctagcagctatgggagagctggggatggtgggaatgtgggggaccagtcctagcagctgtgggggagctggggatgataggaatatgggggacctgtcctagcagctatgggagagctggggatggtaggaatgtggaagaccagtcctcacagctgtggggaagctggggatggtaggaatgtggaggatcagtcctagcagctatgggtgagctggggatggtaggaatgtgggggaccagtcctagcagctatgggagagctagggatggtaggaatgtggaggaccagtcctagcagctatgggagagctggggatggtgggaatgtgggggaccagtcctagcagctgtgggggagctggggatgataggaatatgggggacctgtcctagcagctatgggagagctggggatggtaggaatgtggaggaccagtcctcacagctgtggggaagctggggatggtaggaatgtggaggatcagtcctagcagctatgggtgagctggggatggtaggaatgtgggggaccagtcctagcagctatgggagagctagggatggtaggaatgtggaggaccagtcctagcagctatgggagagctggggatggtaggaatgtgagggaccagtcctagcagctatgggagagctgggaatggtaggaatgtgggggaccagtcctagcagctatgggagagctggggatggtaggaatgtgggaggcctgtcctagcagctatgggagagttgaggatagtaggaatgtgggggaccagacctagcagctatgggagagctggggatggtagtagtatgggggaccagtcctagcagctatgggagagctgggaatggtaggaacgtggaggaccagtcctaggagctatgggagagctggggatggtaggaatgtgggggaccagtcctagcagctatgggagagctggtaatggtaggaatgtgggggaccagtcctagcagctatgggagagctggggatggtgggaatgtgggggaccagtcctagcagctgtgggggagctggggatgataggaatgtgggggacctgtcctagcagctaagggagagctggggatggtgggaatgtgggggaccagtcctcgcagctgtggggagctggggcaggtgggaatgtgagaaaacaatccttgagctatggaggagctggggatggcaaggatgaaaaggggcaaatcctagcagctagagggaagctggggcaggtgagggcgggtgtaaggaaccagacctagaaactatgggggaagtggagcaggtaaaaatgtgataaaccagttatgcagtccagaggctggtaggagtgtaagggagcagacatagtggctatggggaactgggatatatgggagtgtaagggaccagattcagtagctatggtggaacttgggagtgtagatgagcacgctgaaaagctatggtgcaactgcaacaggttgtcagggtgtaaagaaccagacccagcagccatgggaaacctggggaaagtagcgatgtgggggaccagatttggcacctataagggagctggggcatgtggacatatgaggggccagaagcagcagttatagggaaactttgaaatataggcaagtgtaccaagaagccgtagtggagctgaaacagatcctaggtcctatggaggagctgaagaaggtgggagtgtgagggaccaggccgagcatctgtggaagggctgaggcagggctctgggtcggatgggagtggcaccccagagaagccctagaagctctggcgatggagctgagcagttacagtggacttggggctggtgggatcgtaggagaccatgtagctgcagaagagctggagaaaacaggagtatgaaagacccagccaagtagccactgaagagctggggtgttattggggtgtgtggggacacagtcccagcaggtttatagaggttggagccttggcagtatgtgcagtaccaaacccagcagcttggttcaggggcttgagtagaggcaggctaatggggtccacggtaaccctaggcacttaggggactggattgcgaatcttcaggggagctggaacaggcaaagttaaaaggaatcaagcacctggaagaaagcaaggaaagataggattgatggggatccaagaaactcccaggaagtaaccccagcagggacatctgggagctcagttcagacactgaatcaaaagcacagaggaaggagaggtggtaggtttccaagctatcctgtccaggccaatggagcagccaggaaggagggaaggagaccaacaggaatggggcagctgtagccagcagggtgtgagagacagggatgaggctaggtggctagcaagaagggcaacttagtgggagaggggtgaattaaccaccctgacctcatgctgacaggggctgagcaacagacaaaagaataagaaagccaagagctcatggctggaactattctggctgtctgctctgactgtgttgaaggggctaagcacctgttagctaatgaggctaaaacagttaaatgagcaaagtagagcaaaaagctcccacagcggagagcatgggagaacgggagactgtgagatcctcggggggtctaggagtttatctcagagtgaagaacagtgaaaagctctgcttgggagttctttggggaatggcgatcatcctgggaactcccttatagacctcatggcatggaggagagcaggagctcaggcagacagagtagctgtgtgtgagctggataagaaagaaaagagacaacagggagagaagagaaaagggatgggaaaggactcagggctctactgaattcaggcagaagagcttggcttcaggatgctgggggccaaggaaggtgtctgattgagcaggaacatagtcaggaaaagaccctggtgctcacattcccagacaaatcttacaggttaaagttctagtatcagaacccctcgctcagatcctaggggcttatgggaacataaggcaggaagtgaaacctcttaggacagcacgaagtagcctgtgttggcccacagaagaagagcaaggtaactctcagagtttgagcaggggattgaggaaggtagtgtacaggagaggcagaaagaccagaaaggtccccagagtaagaatgaatcaagaatttatgtgtggtttggttcgatgaaggcaaaggcagggaagatagatgagaaactgatcctctttcacaaccaagaactcattgttcagtgtgagttttgatatatagaaggggggggaatgtgctattaaaagtaaaaaagaatgaaccagattcaaaagggaaaggggactaaatgtcttcctgaataatgcagcatacattcctatttcaagagctaccggcaagagaaagggacacttctgggatgtgcccagtaacattagcactgtcagagagaacccagggcagtgcgaagggtgaggtgggggaggaaggtgtctgcactcatcagcgtctcatcagggggcactgagctgtgtagaacaagagtggccagctaggtcaagacagaaaggatgcccacacacagaaggtgtagggtagagggttggtagtaatccccaggaagcagggagcaaggtccaaggagagctaaagtcacggatagagacctagggcacagatttaggagccagagtttgtgtaatgttagtagattcagtaggggcttctgaagggcctcatcactgaaagatcaaggctcctagggctggagagttggctcagtggttgctgctcttccagaggacccaagtccagttcccaacaaccacatggcatcttacaactatctgtaagaaactccagtttctcgagattcaataccctcttctaacagcacaggcatcaggcacacacatagtacacatagtcatacatctaaaataaaatacctaaaaaaaaattaaggtcagagtgcagggtctagaagtggaagctgctgacaccacttaccccagagcaacttgagaagacacagtctttttagagcaaagctaaggccagagcctctccaaatatctgaggccacgcatgttggaaaagctcacactccctcctctcttgcagcccaaacaacagccccatctgtctatccactggctcctggatgtggtgatacaaccagctccacggtgactctgggatgcctggtcaagggctatttccctgagccagtcaccgtgacctggaactctggagccctgtccagcgatgtgcacacctttccagctgtcctgcagtctgggctctacactctcaccagctcagtgacctccagcacctggcccagccagaccgtcacctgcaacgtagcccacccggccagcagcaccaaggtggacaagaaagttggtgagaggacaaccaggggacgaggggctcactagacgtgaggataaggcattagattgcctacaccaaccagggtgggcagacatcaccagggagggggcctcagcccgggagacactgtctctgcctccctcctggaggcctcctggaggcctctgcctatggccacccaccccctaagacatgatcctctggtatagatgtctgtgtcatgcataggatcataccagggacaaactttcctctctggtttggtgccttctctccttgaaaacccagtaacatccagtcttctctctacagagcgcagaaatggcggcattggacacaaatgccctacatgccctacatgtcacaaatgcccaggtaagtcactagacctggaccccagctccacaatgatggcaagagctgtaagcatcccagcactgcaggataagccacgtactgacccatttctatctctcctcatcagttcctgaactcttgggtggaccatctgtcttcatcttcccgccaaagcccaaggacatcctcttgatctcccagaacgccaaggtcacgtgtgtggtggtggatgtgagcgaggaggagccggacgtccagttcagctggtttgtgaacaacgtagaagtacacacagctcagacacaaccccgtgaggagcagtacaacagcaccttcagagtggtcagtgccctccccatccagcaccaggactggatgagcggcaaggagttcaaatgcaaggtcaacaacaaagccctcccaagccccatcgagaaaaccatctcaaaacccaaaggtgagagctgcaggccgactgcctggggactgggataggtataagaatgaatgcccgtgtggacggccatgacctctgtgtctgtttctatccccacagggctagtcagaaaaccacaggtatacgtcatgggtccaccgacagagcagttgactgagcaaacggtcagtttgacctgcttgacctcaggcttcctccctaacgacatcggtgtggagtggaccagcaacgggcatatagaaaagaactacaagaacaccgagccagtgatggactctgacggttctttcttcatgtacagcaagctcaatgtggaaaggagcaggtgggatagcagagcgcccttcgtctgctccgtggtccacgagggtctgcacaatcaccacgtggagaagagcatctcccggcctccgggtaaatgagcacggcacccagaaagctctcaggtcctaagggacactgacacccatctccacccttcccttgtgtaaataaagcacccagcactgccctgggaccctgcaaaactgtcctggttctttccggggtatagagcctaggtcacgggctttaaggtctggctggggtttaaggccagagttgtcttcaggaagagagtgaggtttccacactgccagactcagagctcatgagtcatcagggcctggagtgttggggcttagctttaggaagtgcctattccttgacttcaaactaaccagcagctgccagacggagagatacacctaggaaacctccaagggaagaaacacacaaactccaccaccctctgcctgttcctatccccatgtcccactcctctgcctatgggtttctctgagtctattgcacacatggccatgggcgtgccagagacccttgctatccctacactcaactaaacccaggcagcttttcatgggctaggtctgcacacccatacagactgcccactcatgcctgtgccacgtgagactgaggcagatggctcttgccgcccaaagggagggtctgttagccacatgcatactgaatcctgacccattcaaatcagcctgccgaacatcatccagtccgtatagcacatgtatccacgtgcacatgtgcacacacatttaacacaccaggactccgcctgtgtgccctgcacagcacctacacccagcagtgtatcaggatacccacaaccaccacttgagtgcccacgtttctgccatcacaaccagacacacctttccccttctaaggtcactgcattctaggctcagcacaagtcctctgaagccagatccgtctctggtacctcagggtcacgcttcaaccccacatgaattatacaacccagagccataatggtctgagtcacttcacactctggaattttctcaagttcaggcaagaccaggcacaggctccgctggtgattgagggacaggtaaagggtcagaccagctgtatagccactgtccactggggtcacaggccctgctgacccttcaccttctcctgtactgcaaacagagagggcccttgcacaatccaggccgccatgaggtccactgtgtctggcaaaccccaaggccttatccaactcagccggagggaacttagactgatgtcccagagggaaaagaaaggaaagtagggagtagaaagtctcccagggagactctgctggcccagcccaaatggagctttctcctctgccacatggggaattgctcccagccccccactttattgggacaaattctgactgccctctctgtccagggctagaagtggatgatgattgtgctgaggctcaggacggggagctggacgggctctggacgaccatcaccatcttcatcagcctcttcctgctcagtgtgtgctacagtgcctccatcacactcttcaaggtcagccacaccatcccccaccatctgctgtgatgcctgtgtcaaccctgcgatgtcctcacactcctctcctgacgtagtaggatgttcccttgctgtccccactctgccccacacaccattcccaccgttccctgagccgtcccacattgctctgtgtggctacccatggcgtccatactgtctgacattctatctctcttgctgtcctatgtgatctccatactgtcttacgaaacctccttgcatgccacactacccttcatgacgtccctgctatctaccatgctacccctctgggtgtccccatcagcctcaccatgtattctttgagctatcctcataccatctcaacctcaactcccacgatgtctccacaccggctcctagtctatgtcaccctgaccccttgccatccccagtctcctgcctgtatgaaaggaactgcaggagggacgggcctctgtcttgcccacagggctgaagggcctaagcatgggtgtgttctctgacttactcccacctccccacaggtaaagtggatcttctcctcagtggtggagctgaagcagacaatctcccctgactacagaaacatgattggtcaaggagcctaggccacttcctctgggatgagcttcctgggccccgcacaaccccatccatcctactgtgcagcctaatgtggaggccacactgccgtctgacagtgccaccctctagccctgtgactctgatccagaactctagactgtcttccttttggaggatcatgtggacaatgagctataccccagacccaaacagcacctccacagcagttgccaggaaactaactggttgggaccagaagaaccatctctaggatgtttgcctcagaggagctgggagtccacggtgcctgagtcgagctccatgggaatcagccgtgtctgaaatgggtcttcccagaaagagcaatgttttcagatccttgaaaggaaacatctgctaggaagaccatggtcgccacagccccaaagagtcacttcactctggtagcctttgaaccagttatatctggacaccttctttcccggtacttctgtgaaccctgggctgagtaaggggtttatgtttctcaaactgttgggatgagcctccccgagatgaagctccttgtgcagtcttctcttcccgaaacccactcaacatgctggactcttgggttcaggatccgatccgaagacaccattgacgacgcaacctcaagacaaggccactgtcacctccatagagactccatccacactctgcagggacaggaggactgctttgtgtaacctccgcaaagccctagcagggacaagtgcacagaccactgagtattggtgaggtgaccaggcaggaaaacctccaggagagggccctgatgagaagattcatattgggctcaaaaaatgggatggggggaggggggcgggtgggaaagaacagtgggcagggtgtgaacagatgattagaagacagtcacagtgccgcagatctgccctgcaggcctgctttccagactggaccacttacagcagaaaacaacagttacagtaagcatctaggagagtggacctggaataccagggctgctgtggccagtggagagtagccctgcatctacttctccattacctctcatggccaataagaagccagagcatccaggcagaaagaaagagtgtgcgtttctgtgactggtaggaaatgcttagagaacttggatctttaaaacagcttttttctagactgtgaatgtctttaagcactctctttcctctccattccctccctctctctttctctctctctctctctctctctctctctctctctctctctctctctctctgtgtgtgtgtgtgtgtgtgtgtgtgtgtgtgtgtgtgtgtgtgcactcacacacactgttgttttggcattttaaacaataaaacattcttttaacattttgtatctcatggtgtcccttcttaatggattagccctaacaccaaggaacagggcacagttaacagatcaattagccatgcacatccctcctgaccctgtcctcccagggttccctcagtgggtccctcatggctgggttccagccctaccagagccacaaaaagcttgggcatattcctccacacacacagcttttttccccagctggagactgctctgctgccatgggcaggctgtggagcagggctgatgcccagggtagaccctaggctagccagacaaaggtcccatgacagcagagaagcatgtgcctctcactggccttgggctgctacagagtcagcaaaggacatggatccagctacctccacagctggtgctcattgtctcaagccatgtccagagaagttccagatcaggcattgacagggtggagagctctctccttggttggtaggtgtcttctcctccatgtgacctcagagccccccccctttctgtgtgtgtgtgtgtatgtgtgtgtgtgcgcgcgcgcgcgcgcgcgtcctagcctcttctcataagtgcacagtcaggccggaagaggtgcatcctagccctaatcataacttaccagtttatgatcctgtctgcaaacataggcatagtctgaggtcctggtgatttaaatgtcaattggtgagtcttctggggcttcctacatacaatgccccttccccatgccaacatcccaaagtctcacccatccagcattcagctctatcccaagtcacctccaaaggcctgctagtcaagtaaggatcagatcgtgtggggttcgtcctgagataggattcagccatggtttccaggaggaaggggcaggagagaggcacaggggagagacgtataccgtgatgaactggacagactgataatgtgctgtccagaagaaagctgagggcaaacaggggcccctcccacttacactgaggtgacagttcctaagggagagtgagggatttgtagagagaagtggaggttccacagagttggagaagcaaaagattactagaggtagcctggtgtttgcaatgtctgttttctgttatggttgacatcaggattccatgctactctgtagatcaagggatacaggttccacatctttgtgtggcactgtggtggaggggcttgggcccagatactcccgggacatggaaaatacagacatcggcaggggaagaaatgggatgattcacaaccaaaggcctcctcatccgatgcttactgatctccgagagcaggagtcgggtgctggctgggcagttatcatctcccagtatttcccaggtggcatttagtagctgagacatcttcagattgtggccttggctgttagacactctatctgtttgggtctgtgtaggtgatggtggaggctgaatgaaggactggacaagggacaaaaggatcaggtcaacaaagctgcagcagagacaggagccaacctgaccaacaccactgtggcttccatgggacagttctgttttagccaggacagaagggaacagagctgcgtgaatggcattactcctatgggagtcacacagacaggctaatcacccagacaacaccaactggccagtgagaccagtgagatcctgcccacgcttcctcttaggtctggctctgtttctctagttgtcttccctggagcaaatgttgggaattgagcccatatcctctgcaagaccagtaaatgttaactactgaggcatttctccagccctgcctcaacctcttactggaagatggtcccaaaccaaaactgacggcatggtctcagaaagtacagattcgccacctccaaacccttctctcatgtctgtctgtctgtctgtctgtctgtatgtatgtatgtatgtatggccctgcaccatcacccaccacctcctggtgtcctgcagcaggggcttcccacagcaggacgtaccatagctcccaccccttacacctccatcagcactataaacatatagacacaagtgccataaccctggacacaccttctgaccccgcccccatctctgagaccaactgatctcaggctgtgttttactgaatgtgtccattcggtaaaagctatctgagtcctgccctcctgacctctatagtgtgacatccatggtgtgtgtcctgtgtcataacacgtaggtatgtcataccgtgtgttaccacatatgatatgtgtgtgaaacatccccacatgatgcctgtggtggacatgtatatatatatcttttatgacttctataggggacatcaattgcagaatacctgtgctagccagtagccatgactgaccagacagctactgacacttgacccacttgcattctgtcacagtctgggaatcataacatgacacaaacgccgattgtagcaccaggtcatgggcctgcatgagacttgacatgtgtacacacatgacatgtgtacacacaaaccacacgaaaaagtgtctcggaaaacacacacagacacatccacatgagcatcatagtgtggtcacagacatgtccacatgggcatcacagtgtggtatcatgtagtagccacagcatacatgacacagtcacacaagttcttacaagaacatacatgtctgccagttcccagaactcctggcctcaggctcagcactggccaccctggcccagcacacttcccatgcttcaagctttgcacacacagatccactgtattcccttcctgtgtttaccccattaccttcagcacaccacccacctctcttccatgactgcccccatcccacctagcacggcgccccactactgtgctagctttgttcactcagtgaccatgtgtgtccatcttccagtgaagcttgagctctggggacaagaacgtccctccagattcatgttcctgcagttctatccaactgttcagcatctgtgatgaagtcacaccaagtccctcaccccctaactagtcttctaatctggcatagttatgtgctgggaactaagtagatggtcaaagtaggatatgatgctggccaatggtgcagaccagtaggtccatgtgctgacccttcaactctaaagtcttccccacgcctaccatgtagccataagatctttcccccaaggcagggtacagacaccacatagaggaagaagaccaagtggatgggccccccatagcaggtatgggagagtcaggctgacatagcaagtgtgggagagtcaggctgccatagcaagtgtgggagagtcaggctgccatagcaagtgtgggagagtcaggctgacatagcaagtgtgggagagtcaggctgacatagcaagtgtgggagagtcaggctgccatagcaagtgtgggagagtcaggctgacatagcaagtgtgggagagtcaggctgacatagcaagtgtgggagagtcaggctgacatagcaagtgtgggagagtcaggctgccgggcacaaaggatatgctggacttagggaagccatcctccctgttttctgcccaagcacatatgtatcctactatcagctctctcattgttcactccatactcaagcatctgcccataggaggaagacctcagcctcaagtcaggatgtacatgagagcagccacagagtgagtccatatagttctgttcttttgccccaaaatgtcatgttccagaactacttgttcctttgacctagaccccagaaaagagaccagacactatagtagacacggaagtaagaacaacacagtgctgttgtttctctgctggcaaaggttgttgccacacttatccctggcaaagatataaaacagatgtcatcaaaatgccagtcctggttgtaaatacatatttagaaatgtctgtgtgtgtgtgtgtgtgtgtgtgtgtgtgtgtgtgtgtgtgtgtgtgtgtgtggagacaacaggtaaaaaaataaagacgatgttagagggaggaaattaaagttggaaatgatataatcatatttttattggataatttatatttacatttcaaatgttattccttttccaggtttctcgtccataagccccctgtcccatctccctcccccttcttctataagggtgttccccctctccaaccacaccccattcccgcctccctgccctgacatttccctgcattggggtgggggggatggggttccagccttggcaggaccaaggacttctcctcccattggtacccaacaaggccatcctctgctacacatgcagctggagccatgggtctgttcatatgtacactttgggtagtggtttagtccctgggagctctggttggttagtattgtttgttcttatggggttgcaaaacccttcagctccttcaatcctttctctaactcttccaacagggaccccatgctcagttcaatggtttgctgctaacatccgcctctgtatttgacacactctggctaagcctctcaggagacggctatatcaggctcctgtcaacatgcacttattagcttaatcaataatgtctagttatggtgggtgtatatatatggactggatccccaggtggggcaggctctgaatgtccattccttcagtctctactcagaaatttgtctcaatatctcctcctgtgcatatttttgttcccccttttaagaaggactgaagcatctgcaccttggtcgtcattcttcttgagcttcatgtggtctgtggattgtatcttgggtacttcaagcttctgggctaatttccacttatcaatgagtgcataccatgtgtgtgtttctgtgattgggttaccacactcaggatgatattttctacttccatccatttgcctacagatttcatgaagttattgtttttgatagctaagcattcattgtatagatgtaccacattttctgtatccattcctctgttgaagggcatctgggttctttccagcttctggctattataaataaggctgcaatgaacatagtggagcacgtgtccttgttatatgtcggggcatcttttgggtatatgcccaagagaagtatatctgggtcctcaggtagttcaatgtccaattttctgaggaacctccagactgatttccagagtgtttgtaccagcttgcaatcccaccaacaatggaggagtgttcctctttctccacatcctcgccagcatctgctgtcacctgagttttttttttttttttttagagagacatggaagaagattgtttgttggtctatatttatggcttgctcagcctgtggttttgttttttattaacttgagtatttcttatatacatttcgagtgttattccctttcccagtttccgggcaaacattcccctcccccctctccttccttatgggtgttcccctccccatcctccccccattgccgccctccccccaacagtctagttcactgggggttcaatcttagcaggacccagggcttccccttccactggtgctcttactaggatattcattgctacctatgaggtcagagtccagggtcagtccatgtatagtctttaggtagtggcttagtccctggaagctctggttgcttgacattgttgtacttttggggtctcgagccccttcaagctcttccagttctttctctgattccttcaacgggggtcctattctcagttcagtggtttgctgctggcattcgcctctgtatttgctctattctggctgtgtctctcaggagcgatctacatccagctcctgtcggcctgcacttctttgcttcatccatcttgtctaattggatggctgtatatgtatgggccatatgtggggcaggctctgaatgggtgttccttctgtgtctgttttaatctttgcctctctcttccctgccaagggtattcttgttccccttttaaagaaggagtgaagcattcacattttgatcatccgtcttgagtttcatttgttctaggcatctagggtaattcaagcatttgggctaatagccacttatcaatgagtgcataccatgtgtgcttttctgtgattgggttacctcactcagtcacctgagtttttgatcttagctattctgactggtgtgaggtggaatctctgggttgttttgatttgcatttccctgatgactaaggatgttgagcatttctttgggtacttctgagccattcgatattcctcagctgagaattctttgattacctttgtaccccattttaataggattatttgactctctggagtctaatttcttcagttctttgtatatattggaaattagccctctatcagatgtatgattgataaaaaatcttttccgatctgttggttgccattttgtcctaatgacagtgtcctttgtcttacagaagctttgcagttttatgaggtcccatttgtcgattcttgatcttacaacataagccattggtgttttgttcaggaaattttccccagttcccatgtgttcgagggttcttcccactttttcttctattagtttgaatatatatgattgcatgtggaggtccttgatccacttggacttaagctttgtacatggtgataaaaatggatcaatttgcattcttctacatgctgacctccagttaaaccagcgccatttgttgaaaatgctaatttttgtccattgaatgattttagatcctttgtcaaagatcaagtgaccatacttgtgtgggttcatttctgggtactcaattctattccattgatcttcctgcctatctctgtacgaatatcacacagtttttatcactattgctctgtagtactgcttgaggtcatggatggtgattcccccagaagttcttttatggttgaggatagttttcgccatcctggattttttgttattccaaatgaatttgcaaattgctctttctaactctatgaaaaattgagttggaattttgatggggattccattgaatctgtagattgctttaggcaaaatggccatttttactatattaatccagcctatccatgagcatgggtgatctttccatcttctgagatcttcctcaatttctttcttcagaaactcgaagttcttatcatacagatctttcacttgcttggttaaagtcacaccaaggtattttatggtatatgtgactattgtgtcataatttctttctcagtcttttatccttggagtagaggaaggttactgattggtttgagttaattttatacccagccactttgctgaagttgtttgtcaggttaagtagtctcttgtggaacttttcgggtcacttaactatatactatcttatcacctgcaaatagaggtattttgacttcttcctttccaatttgtatctatttgacctccttttgttgtctgatttctctgggtaggactttgaatgctatattgaataagtaggaaaagagtaggcagccttgtctagttcaattttagtgggattattcaagtttctctcgatttagtttaatgttggctactggcttgctgtatattacttttacattttatattactttttttatgtttaggtataggctttgaattattgatctgtccatgacttttatcatgaaggggtgttgaattttgacaaatgctttctctgcatctaatgaaatgatcatgtggtttctatctttgagtttgtttatatagtggatcacgttgatggttttctgtatattaaaccatccctgcaaccctgggatgaagcctacttgatcatgatggatgattgttttgatgtattcttagatttggtttgtgagaattttattgagtatttttacgtccatattcgtaagggaagttggtctgaagttctctttctttgtcgagtcttgatgtggattaggtataagcataattgtggcttaatacaaggaattgggtagtgctccttctgtttctattttctggaatagtttgggcatagtttagtatgaggtcttctataaaggtctgatagaattctgaactaaacccatcctctcctgggcttttttttttttttagttggagacttttaataactgctcctatttctttagaagttatggtactgtttagatggtttatctgaccctgatttaactttggtacctggtatccatctagaaaattgtacatttcctccagattttccagttttgttgaacttaagtttttgtaatagaatctgatgatttttttaatttcctcggattctgttatttctcccttttcagttctgactttgttaatttggatacgttatctgtgccctctgattagtctggctgaggatttatctatcttgttgcttttctcaaagaagcagctcctggttctttgtatagtcctttttgttactacctggttgatttcagccctgagtttgaagggctcttcaaactcctctactcctcttgggtgtatttgcttctttttgttctagagcttttaggtgtgctgtcaacctactaatgtatgctctcccctgtttctttttggaggcactcagagctatgagttttcctcttagcactgctttcatttgtgttccataagtttgggtatgttgggccttcattttcactaaattctaaaaagtctttaatttctttctttatttcttccttgaccaagttatcattgagtagagcgttgttcaacttccatgtatatgtgggctttctgttgtttttgttgttattgaagaccagccttagtccatggtgatctgataggatgcatgggattactgcaatcttcttgtatctgttgaggcctgttttgtgacagattatatggtcaattttggagaagctaccatgaggtgctgagaagaaggtatattcttttgttttaggataaaatgttctataaatatctgttaaatccatttggttcataacttgttagtttctctatgtctctgtttggtttctgtttccattatctgtccattgatgagagtgggatgttgaaatctcctactattattgtgtgaggcgcaatgtgtgctttgggttttagtaaggcttcttttatgaatgtaagtacctttgcatttggagcatagatattcaggattgagagttcatcttggtggatttttcctttgatggatgtgaagtgtcctttcttatcttttttgatcacttttggttgaaagtcgattttattcaatattagaatggttactccagcttgcttcttcagaccatttgaggtagtgtctgtctttgtctctgaggtgtgttttctgtatgcagcaaaatgctgggtcctctttacatgtccagtctgttactctatgtctttttattgggaaattgagttcattgatgttaagagatattaaggaatagtgattgttctttcctgtttatatttgttagaggtagaattgtatttgtggggctttcttcttttgggtttgttgcaagaagattactttcttgctttttctagggcataatttcctttattgtgttggagttttccatgtattatcctttttaggactgtgtttgtggaaagatattgtgtaaatttggttttctcacggaatatcttggtttctctatctatgttaattgagagttttgctggatatagtagcctggcctggcatttgtgttctcttagggtctgtatgatatctgcccaggatcttctggcttttcatagtctctggtaagaagtctgctataattatgataggtcttcctttgtatgttacttgaccttttttccttactgcttttaatattctttctttgttttgtgcatttggtgttttgacttttatgtgatggaaggaatttcttttctagttcaatctatttggagttctgtaggcttcttatatgtttatgggcatctctttctttaggttagggaaattttcttctataatttttgttgaagatatttactggccctttaagttgagagtcctcactctcttctatacctattatccttaggcttgatcttctcattgtgtcctagatttcctggatgttttaggttaggaactttctgcattttacattatctttgatggttgttttctatggtatcttctgccctgagattctctcttctatttattgtattctgttggggattctttgcatctatgactcctgatctcttccctaggttttctatctccagggttgtctccctttgtgatttctttattgtttctgtttccgtttttagatcctggatggttttgttcaattccttcacctgtttgattgtgttttcctgtaattctttaaggggtttttgtattttctctttacaggcttctacttgtgtttcctctttaagggcttctacttgtttatctatgttgtcctgtatttctttaaggaagttacttatgtccttcttaaagtcctctatcaccatcatgagatgtgatttttaaatccaaatcttgcttttcctgtgtgtttggatccagtatttgctttggtgtgagaactgggctctaatgatgccaagtgtccttagtttctctttcttaggtgctgcgcttgcctcttgccatcaggttgtctctggtgttagattgtcttgctgtctctgacactggcttgaccctcctgtaagcctgtgtgtcagcactcctgtagacctgttttctttcagctggatctgggaacagagagctgctcctgggtttgtgtgtcctgaggccaccaggcaggtcgcttggagcagaagtgttggtcttacctctgctctcaggtgtgtcagcacttctggcaactggctttcagctctggacacaggcagaaaccagaagatttctgcccctgactgctcctagcttcctatgtccagagggcacagagggcactaggtgggttcctcttggtccatgaatgtcagcagaagtagttgtctcctctgagctctcaggactgtccacacttttgagagtccatctctctcccccacaggatttgggaacagagagctgtgggagcggttcagctccgggtgcaggtagaaaccaaaagtatcctgtactagacttctactgcctttattgatataaccatattttaatcccaaaagcaaaaataaatgctttatttctggtcttgagctaagggtatagttcaattgttagagtacttgtctgtaatgcaggagccctggatctgatctccattacagaataaaccaaatgtggtaatgcatgcctgcaatcccaaatcccaaatctccaaaggcgtacacaggaggatgagactttcgaagtcattcttgtctacatagcaaattagagaccaaccttatctttaaaaatagtaataatcctgatcttccacttgaagtaaatgtatccagtaactgtacctgataccattctatgttagattttgtttcagggtttcgaagataagttctccagagaagcacaagtagtgggagatggcggagagagggctggtagatgaacccataaacaacaaacaacagagctggaggacaattaggatgatatgtagttagaaacagagggacagcatataagagacaacagggagataacacataagagacaacacagggataacacacaaaagacagaagagagataatacataagagacaacagagggacagcgcataagagacaacagggagataacacgtaagagacaacagagggataacacataaagacttagagttttatggttcgccttgactagattaaggaatgaatgcctgtggaggtgtctatgaaggactttccagaagtgttaggtcttagggggctctgacttagccctttggtggagtgagaatgtggtggcattatagaaaaatgctgaacagtaagaagtccaggtggaggaagcagattactgggggtgtgcatgggccattacatctgaccctggacactacattccctttatctctacttcccatcagtcaagaaataaatagcctcttccacacaaccccactgtcattatggccctaagcacataagccccccaccctttaagtttctttgaggtatctggtcatcctggctcccagctccaagtcacccaaagggttcatataggcaagcatttccacctctaccgtgttccatcacaaaccactggctatttgagaaatttcagacagctaaagaatggttctcttagcactgatggccttgcattcaagagacttgcctgctggtttgcaaacctagaggctatggcactgaacttggacacccggtggcgtgctgcttttggcatagagaaagctgacatccagcagctaagtgactgctcctgagctttggaactcgttctcctgtatcaccctctacatccaactcttctcagcttgtcttctcaatatttccactgtccctcatcaccttagattcttgtagacgctgccctcaatggcttactggctcctcaactacttcctgccactgtcgccctcagggctggaaacctggagccttgtctgctcttggcacagccacacagcttactctacccatgacaaataaggagacttggagaccatttggggaaagcctttatcagggcctaatgggtgcacacttggatcaggagtcatccattggagagaagcctcaaggaatagtggggaacatactgtatctagagacagtatagggtcatgatggcgtggattatactccccacaaagacagccctgcatgtgctctgcttccagtctcaccaatcacaaccctcccgtatgaacccatcacagcccttgcacagattgcaggtctcaaatatgttcacctttctttctgacataaccaggattttttttaatttgcttgcgtgtttattatttctatttattttattcattttttatttattattttacatcccactcactacccctctccccatcatcccctcccaagatccttcccccatcccctctccctttcacctctgagccagtggtgccccctccgtgtatctcccaaccctaataatcaggtggtttgagccaccagggaagatgctcttcttcctttctgaccttgagagctgctattccaaggtcctctggagctgtgtgtgtgaagtcacctggaggtcataggtggagtggagttttaaggccatggtagaggctggagccatagtagttggaacaaggctgtggtttcagcagcagccatgattgttgtatactttgcagctcaaatatggtctcctcagggctctgtgaggtattcaaagcacctagaatcccatgatgacacttccaccagtctctaaaagagacctaagactactagatatagaaaaaggccaacttaagtacatcaaaaggtcaagccttctggcccctaatggctcattttacatgaagaaaaggtgaccattacactatgcccaataaagacatgttacatttacactacggtccttggcatcccttagcagatgatcctagggagagctgagcaatctcgtccatctcacctccacccagtcaccaaaataacactgttctaaggcacacttctgagacttacagagctactagagagttgggggtagcagtaagacctttccctggccctcaagatacgttcacacccacatcacatatatgagttcgcatacactaacacacacagcacatcttggacatggcccattcaggaacagatctgtcatgatcgcttgagttaaggaaccactcaagggaatgactaaaggaggatcccactggagtcctggcccacaggaggaggtggaataaaggttaggtagggcaagacaagggcactaaagccactatgctgctggggccactgtggacactgatggccagaaatggaatgatcagcctgtaggcaggaggggggagggaggatgattcctgaaaaccagaagagtcaccgtggagtctgaaccaggaaggagagagagctcccagtgtaaccctaaggcttaagtagttgcaactgcctcctctccttccagaggaccacccactgccacctagcatagcactctgaggactcagaaccagcagcccagcataagctgagtgtcaaagaagaatcaggcccaagcaggctggacacaaagtttcttggtcctcaggctatgagggagatggagtccttcccactattcggggcacaccacagacagcagcacctgatccagttggagcaaaggctcctcacccctgtgttttccctcagaaccacaagtctttccaggaaactctgtatttacccctcagattcccacccaggtctgttaggctaaaggccaagcctgtcacctcagactatctgaaagagataaaaccaggcaagacccccaattccctcagatctcacaccccgtgttcccaaagtccctaactaactttcctggggccagcccggggcctacctggttcttccactgtcagttagctctctgatgtcttccaaatacaattaaacacccttctgtgggaagtcagacttggcaaagcctaagtcccccagtcccttgcatcccannnnnnnnnnnnnnnnnnnnnnnnnnnnnnnnnnnnnnnnnnnnnnnnnnnnnnnnnnnnnnnnnnnnnnnnnnnnnnnnnnnnnnnnnnnnnnnnnnnnnnnnnnnnnnnnnnnnnnnnnnnnnnnnnngggaagctgctgggcccacacaccatctttaccctctccccttccctcagtgcagacgtagaccacaggcctggaagagacgttagctgtttctatggtgttccatgagacccagttactccccagatgtgctctgtccttgccagagtagcaagtagaggaccccaagccgaagggcggccacttgtgagtgattaccagggaagcccactgtctctagcatgccagctccaaagctgagacaggaaccagggggcctctatcagaggccctgcgtgtcatatcgtgcccacaggctgttcctctttgtgtatcgttaataacttacaacgtgactgccacactgccccgaaggactgccaagggaacagaaaaggcaatggcttgagtccagtcccttttcagggcagtagcactccaaaggggcaggcatcgtgactgcaggaacatgcaagtttctaacgtgagagctgtgcagaacaccagacaacgaaaagtgccctgaccagagcgtgcaggtgtgtctcctagaaagaggcctcacctgagacgccactgtcccttagtcaacttcccaagaacagaataaaaaagggaacttccaaggctgctaaggccgggggttcccaccccacttttagctgagggcactgaggcagagcggcccctaggtactaccatctgggcacgaatgcaataatggttactaaagattcacaacgtctgggagcctgcacagggacaggagatggctgcagatgagaagagcctggctagccacagccacttaccagcggacctcaggtatcatagcctgtgggaccctgagccaaagggtttgcccaaggagaatgggcaaacaggttacagggtcctggatggggaagggggcacctgggctgccttctaacaaggacagagtctcttggtcattgcctgtccttcagctgtcactcctctgcattaaggcacacagttattagacactactaccgctatccacaaagacaggggactgtggatctcaaccagacatggctgaaccaagagaaactgaagatgtcgtgagaagctcagaaaacgccaggagaagctgaataggaatctgcctgcaaaccatcagggcaaggaggcaataacaagtgacagagccaacgagtgacagcaaggaattgccctgtgatgaactaacaacaaagctgggctgacctgggctaagctaggagtgggatctgtgctgcactgggctggaaggagccgggatgagccaagcaaagtgggttggactgagttgaattggcctggactagtttgtgttgggctgggctggcctggaataggtaggctaaaccagcttaaactagggtaggctgggcttaactgaatcagactaggctagactaagcagaactgggctgggttgaactgggctacactagcctggtctgatctaggataggctgggctaagctgagctggactggctggactgggctgagctaagttgcactggacagagctgggctggagtggactggactgggttggattgggctggactgggctgggctaggctgagctaaattgcactggacagagctgggctagagtggactggacagagctgggctagagtggactggactgggctgggctgggctgggctgggctgggctgggctgggctgggctgggctgagctgggctgggctgggctgggctggactgggctgggctggactgggctggactgggctggactgggctgggctgggctgggctgggctgggctgggctgggctgggctgggctgggctgggctgggctgggctcagcaggcctaagtaggcctagctgggtttagctaggtttggctaggtaaggctgagctagattggactggactgaaccaggtggggtatattcagctgacattgtttggtctggtctggactgaactggactgagccgggctagcctaagctagatggggggtatactcagctgagatgggctggtctggctagattgaactggactggactaggctgagccaggctgacctgagatgtcctgatctgggctgaactgggcagggctggtctcagctggactacactgagttaacctgggctgaaccagactgggctaaactaggttgtactggctggattagacttggctaaactgggcttggctaaactgagtcaggatggtctaggttgatttttagttgggctaaactaagctgaactacactgaactaggcaagactgggctggaaaggtctgagttaaattaggagggacttggctgggctgggctgggctgggccaggctgggctgagctgggccaggctgggctgagctgggctgagctgggctgagctggattgagccgggctgaactggactgagctgggatgagctggactgagctggactgggttgagctgaacaaaactaaactggaatgggctaaattggcctaaaattggctaggctaagctaagtaaggctgccctgagctgagaaggactggattggcctggactgagtttggatgagcatcattggactatgctaagctaacttgggtgaagtgggctaagcaggactaatctggcctgatctgagctagaccaagctaggccaagctcagctaagtttagcttagctgaattaggctgggctggactgtattgagctacactaaatttaacaggctgagctgagctgagctgagctgagctgagctgagctgagctgagctaagctgagctggttttgtctaaggtggattgacctgggctggactgaactcaattggactacactgaacttatctggacctcactgagctgtgctgcactgggccaaccctggatcactctagatctagcttagctggactgggctgagctagattgggtggactgatctaggctgaactagactattcttgcctgaggaaggctgggctatgctgagttgaactaaactgaactcagctaaggaaggctaagctagactgagctgagctacgttgggttgggctaaactgggctgagctatctcgggtagactaggctgagctagactaaattgggctgagctggagttggttggactggactgggttgggctaagctgagctgatttggtgtaatctgggatcaggtggcttgagctggactggactgtctgagctaaactgggttgagtggagctgagtgggtctgagtgaggctaggctggaatgagctaggctaaactgggctgaactggtttaggttgaatttagctgagatgagctgggctagacttctataagatggctgaactctgctagggtgaactgagctgtgctgagctgaacttggattaactataattagttgagctgggctgaactaggctgagtttagctggaataagagtcaactgggcccaactgagctaggctaagctaggctgaactgggatgagctagaattactgttctagtctgatctggactaaggtagactgggctggggttgagctctgttgggctaagcaaagttgagctatgagatgaactaggctgaattgggtacttctagatcattccaggctgttctgggttgacctgaactgggtgggattgagctaagtggggtaggctatgctgagctctgccaggctgcatgagtttattgatctgaactgggacaggctggaatggactggcctgagctacaccaactgggctaagctgggataggtcaggctaggaggagtcaagctggactaggccaaactattataggtcttttggtctagttgaactttctggtgcttaactgaactgtgtttaagatcgattgctcaaaccagagggaggagaagcccttggccctgccaaggctggaccccacacacacaccagtgtaggggaatgtcaggacagagaggtggaaaggggtgggtggttgggtgggggaaaagtgataacatttgaaatgtaagtttaaaaaaaatccaaaaaataaattaatttaaaaaaaaatagattgctcgaaattttttatggatgtttttaactgttctccaagaagattgtcctgatatagtagccagactatatcagggtaggtagagacaatcaggtttatcagaaatatcctatgctttctgggggcctggcacagagctgaactgggccccaggctcaggagaatgtcacgggcatgcgggcactccagaataatttaggcagccatcaaggtggcttctgaagtggttgtattctctaactgtgtgctgtctaggatctgcagaggtcactaggaggcagaacactttgcaggttagcctgtggtaaagccaagagccccatgaatctgaaaggctgagaccaatagccctaggaaacaagggtctcacagttctgtcattaatgtgtcccaaaacagatttaatgtgtctcgccaaggaactggtgctcctgggaaagctctgaatccccaggtcccaaaagtggggacggaagatacaaaagtaattcactggatctctgggttcccaagccctttggggtacctgtgtcttggatttaaagtatagcctggtccctctggcaatatcatacagcctaccttaaagctactccattcaccctgagaacctaatggcttccagtctgccacccagttctcctgcttcatttatgggcatatcagagataataccactgtcaccctgcttaaaggacagacaggaaataactaacacacacatccccaaaagttctcagtcaagaaagagagcaaagttgcctcttcctccaaagctcatacccagccctcctggaagcccctgtgctaagccagctaggggcagtgagcaaagcttggcagagcatcaataatcaggggcctccctgggtttgtgcttgggtttagagaatgaagacaagacccagaaggagactgtctcctagactggaagagaatccccagaaccctgctcctgtcacagctgccctaatcagtcccctatgctgcaggcatgcagtgatctaaacaaatctaacctaggtccttcctgtcccacagtttctgtcaaggccccttcactctatcccttgaagccctgtagcagcgaaaacacggcttcggtgacattgggctgcctggtaaaggactacttccctgatccggtgactgtgacctggtattcagactccctgaacacgagcaccatgaacttcccgtctatcggttctgatcttaagaccaccaccagccaaatgaccagctggggcaagtcagccaagaacttcacttgccacgtgacacatgccccatccacattcgtcagtgacttgactatccggggtaagcagggttgagctggttacagttaccacaagagggaacatggtcagagcagaaaggaccgctcatatatacctataacagggggccaggggacccaacatactcaggggcctggtttgaggcttgaggggacataaggttagggagatactcacagctcactgcctctgccctagctcgacctgtcaacatcaccaagcccactgtagatctactccattcatcctgcgaccccaacgcattccactccaccatccagctgtactgctttgtttacggccacatccaaaatgatgtctctatccactggctaatggacgatcggaagatatatgaaacacatgcacaaaatgtcctaatcaaggaggaaggcaaactagcctctacctacagtagactcaacatcacccagcagcaatggatgtctgaaagcaccttcacctgcaaggtcacctcccaaggcgagaactattgggcccacactcggagatgctcaggtaggcccacactcgcctgatgctgagacctcagagttctgaagggaaggcaggctcttacgcagcccttcctctcttacagatgatgagccccggggtgtgattacctacctgatcccacccagtcccctcgacctgtatgaaaatgggactcccaaacttacctgtctggttttggacctggaaagtgaggagaatatcaccgtgacgtgggtccgagagcgtaagaagtctataggttcggcatcccagaggagtaccaagcaccataatgccacaaccagtatcacctccatcttgccagtggatgccaaggactggatcgaaggtgaaggctaccagtgcagagtggaccaccctcactttcccaagcccattgtgcgttccatcaccaaggccccaggtgagcacaggagatggagagtgggccggcccttctctgtgttcagatggcacggttaactggttaactcgtgtctgcccacaggcaagcgctcagccccagaggtatatgtgttcctgccaccggaggaggaggagaaggacaaacgaacactcacctgcttgatccagaatttcttccccgaggatatctctgtgcagtggctgcaggatagcaagctgatccccaaaagccaacatagtaccacgacacctctgaaatacaatggctccaaccaacgcttcttcatctttagccgcctggaggtcaccaaggcactctggacacagacaaaacagttcacctgccgagtgatccatgaggcacttcgggaacccaggaagctggagagaacaatatccaagagccttggtaacacttccctccgtccctcccaggcctccatgtagctgtgatggggaaggtgaatggcagacatctgcccactgttgtaacactgggaagccaccccaataaacactcagtgcctgattagagccctgggtgcccttcttcggggaaggtgggttgtgggcagaagtatcttggcctgaaagaagggaaaccccaagagagggacaggagtgaagcatggctcacccatctgtctatgtgttgggtatttgacaaataggacatcacagggcttcagcatagataaccctggtccttcctgcccttcactgtatcatgcacctgaaagggatccaaagagccagagaggtggtctctagagatgtaggtaaaatgaaccaacctgagaggcctcggcacccacccctcagtcttgcaagctcctgctcccaggtattcctggatgctggaactccttaaggtagagaaacagccaaagtcaacatctggaaaggcagaagtcagcatggccctgctccttccctctgtactcagcagccattgaggctgagcctacggccctgacctcctgtgtgccatgtgatcataccagacccggatcagaacctggtgctcctcatctttcaacccaaagtcatcccaaggcccagaatgggaagccagcttcacacagttgggttctcccatctatgccatgttctcacacacacacacacacacacacacacacacagagccacaaacactcaggccaccaagtcttaaagagactccaccaacagcacacacttgcagccacctgacacaacaacacacctcacccatgttcacatgtggcctgcgctaggcttcagtctgtttccagtcctttaccttttacacttgagtccaaaataaaaacagaagacttacgccctgagggagagaccagtgtcttcttcctgtggcctcagctcccagaacactcttccctaccttctacaacactaagacagtaagatacacccacacgaacataaatacatacacacacacacacacacacacacacacacacacacacacaccccaagtaggcttcatcatgctctttggtttagcaatagcccaaagcaagctatgcatccatctcaggcccagagggatgaggagaccagaatcaagacatacccacgcccatcccacgcccaaccaccaaccaccagcacatacggttcacacacctgagaccagtggctcccatcacacacacacacacacacacacacacacacacacacacacacacacacaagcccgtacacatccaccatatccagagacaagtgtctgagtctgagatacctctgaggatcaccaatggcagagtcggccagcacctcagcctccaggccaatccttatactttggcccactgcaggccatgagagatggaggaggtggaggcctgagctgtggaaaaccagagacaggaagatggtctgtatggagagagtagtaaaccagattatagggagactgaggcaggagtagagctcctacaaggccagtagtctaccttagagtcctataagtctgggctgggagtccatgtgtcctgacttgctcctcagatatcacaaccaagattcctggagccagagtgtgcatgcaggccttagaaatggagcttagagcccttcctggagggccctgggcactctgaacaaaaggcaattctgtaggctgtatagaggcatcctgtcagatacacacacacatgcacacacatacacacacagagacacagacacacacacatgcccacacacatgcatacacacatgcacacacatacacacacagagacacagacacacacacatgcccacacacatgcatacacacatgcatgcacacacacacacatacacacacacacacacacacacacacacacacacacacacacacaccccgcaggtagccttcatcatgctgtctagcgatagcccttttgagggtgggagatactgggtcatggtgggcactggagtagaaagagggaatgagcagtcagggtcaggggaaaaggacatctgcctccagggctgaacagagacttggagcagtcccagagcaagtgggatggggagctctgccactccagtttcaccaggactgcctgagaccagtgagggatccaccctgccacactgtcacttggagtctggggacgctaactggctggtccccccatcccagagctagacatccaggacctatgtaccgaagaggtggagggcgaggagctggaagagctgtggaccagcacttatatcttcatcagcctgttcctgctcagtgtgagctatggggccactgtcactgttctcaaggtgggatcctgcacctcggtgggtgggtcagggaggtctaggccaagctgcagcgccatcctcacatacacctttcccccaggtgaagtgggtcttctccacactgatgcacgatacaccccagaccttccaagactatgccaacatcctccagaccagggcatagatgcgatgccagcacccgtgcaggcctgcagccatgtgtgtctgagcctcctgaggtgcctgtttgccttggatggtaggtgggagcagagacccctaaaggcaccagagttggtgagatgtcaacatgtagaaggtgcggcttggggcagcaatgtgggctgtcccgcatggatactttgagacaggactttgaagagcctcaatttgacctatcaaatgctggtcacccaggtctttcagcatcagggtcactccatattgactgaataaccacaaaagcacaagaacccagagcctagagtccccactaggccccacctagagcacagagtcaaagctgggacactcagaatcaacccaaagtccagacccttgctcctcagaaggaatcctgccccactgcttccagacagacctctggcctaggcagatcgtcctactgccagataaggagcctcccacagggcagcagcagactcaagctctgaggccccatcaaccccagccccagcctggcagtcctactttgtctctggtctctttagtaaagttcttttccataactcctgagagtgctttgagaaggtatttaaggctaccattatggtgatgacaggtcccaagaacatggacaaggaccagatggtaagagcctggggattaaacatccacctctatgccatcctcctcaaaccacagagttctgccccagtctccatccggtccatcattcctgctgaccagactcacctcccaggggaattgaggtggaatcagggctgggcccccgggaacctggctgcaggtcactcttcaagaccacaatctgcccacccagtaagtgcagactgacaggccagtcccctgacccaagctgggacactagagggactaggtaacagcacgcaagtgtacaagaaccatccaaaatgggttgtgccatcctcaagacatgatctcacatgacaaaagacaggcttctctcatatataatgattgctcagggactaagaagaaagacctcttcatgggacggaaaaaccagcagtcactgtttttttcctgaagaaaatgcttcaatggtgagaacacttctagaaagaaggatgttagggtgagtgtggccctgctgggccctgggtaaagaaaggcatgagaactacttagaccattttgagggtcagttggccaaacactcttgtcatcacaagtgacagtctcacaaagaggtccacactggggtgtcaagctcagcaccaggggactttgggggaactaagatagggataaaccagccgggatcaggccatagtccacaggcatctgagccctctgctgctgagtccggcttctacgggccttggagtagggcccagatggcaaagacacagaaagctacccctcctgggtgcagaagacccaggactgggagaatgactgttctgatgagaaaagaggctctgtttaggatgtgtcccaagccattagtgtggccagcttactaatgtgcattcatgctgcaaaccattgctcacaatcaaatgtataccacgcacacagtcacgtagtttgcgcagacccactcatgtggcacatgcctgtgggcacatgggaccacacatacacgtgatgctttaaaacacagatctgcacggtcttgtacttagacacacattgtctcaggaagcccaggtgtggaccaccctgtcctcctgccacattctcctaagccatatcccctgccaagctgaggcctaggtgcctcttcctcaaccagctcctagaccaacatccctgaggcatagctcagtgtcttcttctaatcactatccctccaagccacgagaccccatagacactggacacgggcagcaagggttcagctcaaagaacacggtgtggcaggaactcctaccaaatcccaactagaaggaaggaaagtcccacagagagctagactcactctagacaacccagacagtgaccctggcttctacataccatgaatgaatgaccttctgagactaagaggtcgctttcttctctattcctacattatcagtccaccatggagggctacatggaaaaccccaaaagacataatcacattttggaacccataaatgtagcctcttgggaatagttcttcatcaatgtgaccaaggtaactatctcaagacgaggtcatcaaggactagctagtggactttaacctggtgacaagagtcataagagacagaagcaggacctagggggtaaacagggcctgcattctccaaaatcaaagtgtcaaaacagaaatatggcagcaaaacagaagtaccgtgcccaacactggtcaagaccaatgggggaggctcatgaggggttgcctaacaagagcaggcacaagtgcttagataaaaccacaacctacactcggccaccgtaaccctacatagaaaatgtacctatgggacgtcagctcaacgtcagtcccacctcgttgctgtgcgcagacagctgcagcctgaataacctgtccaagtgtgcatgtcacatccttgatgacacactgtaaccagtgatgccatgttagcacgatgtcctgtgagggtgtcttctgactcgggatggcaaaccctaagaccaaaaggaggtgcttggttcacgagagcggcctcgtggctggacacatggcgttaaatgagcctctgtggactaggaagcagctttaaccagaaagactataccagcaccctgcttcacgtttccacctttgagcctctactgactaagccactggcagccactcagcctgtggtattctctaacggcaacagaaatgactaagacaggcaaccacaatgtcccccactgctgatggctccagggcattcttggcctgatgacaggacctccagagcctccttgagacaggcagatctctggagggcaggaccaagctttctcctctctacctccccaacatctttgactagcttcacagataaaaggctagggggacatcagtttattccacactttctaagtctgatgcaggagcccttcctctgcgaagtatctatccaagaacccagaaaaggctaacttccccaactcaacacttagcaccactgacacacctgaccatacccactgatttacaacctttctcccagacagggccattcctgggcaaagactgtggtgtgagggcccagagtcctattgttgtataaatgaggcacagtggcagaggcaagctacaaagagtgacattgtggagagaggacactggggacagtcggatgtgtagaggatcatatgaagggtggagccctaccctgacaatctacaaagagtgacattgtggagagaggacactggggacagtcggatgtgtagaggatcatatgaagggtggagccctaccctgacaatcttcaagaggctccataggtcaaaggcccatcctgagaaagctgtgataggaaattgactcagggcagatgggatccaaatgagggtagcacctaactgtgacctacagacctccatgttggtcctcaagttggggcacccactttctcatggacgtagccatggaggtagccacagctcgtgacaagccattccagacacttgcctcaccccgttgtcaaccctgtgacctcaaagctcttctctgaggcccccctcagcttagggacccctctggagtagccctgttactttggctccttgacaacaagctctcaggtctcccttctacccctaattgtcctctccctctccatctctgccttggagtctctgagaaactagatgttcatttcattccctcctgcatctcctgcccaacctacccctgtggccatgcatgtggagtcctggccccatccaggcccgtgtggtcagacacacctgtctccaccacagccagaccacaggccagacatgacgtggaggtaagcggccacaatgtggaggtggaacaggaagtgggtgagggaccccatccaggggccagacacacagtcgtgcagccccctcaccgctcagtctgacccatccacaggcaaccacacacagagaaaaccagtttccagccaaggcttcacccagtcctaagctctctccggtagggcagacggcctttagccatgagaatggaccttcagggtgggaccacctggccatgggaggcctggctgttcccctatgaatgacactcaacaaccttgagcaggtgggtcccggtaccatctggactgctctgctccttggtgcactggggaatctcaaccaggccagacctgagaacataaggcagagaagcattagcaaggagaaggtgattcggagagcaagaaccagaggaatacaggacatgaacacaggcacgaggcggggtcatggtctgagctgcagagaagagagaaaaatggatgaaactcagcttcctggaaagcagcaacaagagactcccaggctagactgaggcaaggataaggaggcatcaacaaagaatgggggtgactcgggctgccatggctcagctgagctggatttagccaggctgagctgaactaagcttagctgaggtgaatgagactgagctgagctgagctgggacaaggtaggccaagttgggctgactgagctagtctagactggtctgggctagtctgatctggactggtctgagctgaactgagctaagttgagctgggataaactgggctgaggtgggataagatggcctgacttgggtaactaagccagtctagaattggataaactgaactagactggtccaaactggactagactgagctggactgagttagaatgaggtggactgggctaaactgggctgagctaggttaagctagggtggactagaatgctgatttaagatggcctggggtgggaacgctagctaagccagaccaagctgggctaggctgggttaagttgagttgagctacagtaaactagcctgggctgtgctgaccttactacaccaggctgggtttggttggcatgaatggagctgatttgagctgggctagaccaggttagtatgagctatgctgtcctggtctaagtagactgggtgaggctgagaaaattcgagatggaaactggactgagatggaaaaagataggcttagtgttggcttactgaaccagtctagaatgagctgaactggacttggaatggcctgaactgggcttagcttatctagcctgggcttggctaggctggcctaacctaggctgagttgatctgaactggtgtaggctgggataggcttgctgaaatggactaggtcaagctgggctggagtggggttagctaaaataggtggactaggctgagatgagttaggatgacctgagctatatttaggggatggatgggatgggatgggctatcccaagctaagctgggctagaatgggctagtgtaagctaaactggctgggttggaatgtgctgggctgtgctaagctagaataaactagagtggactggccaaaatcggctgggacggtctgtactgaaccaggctgggctgggctaactgagctagaccggtctgaggtgagctaatctgggatggggcggactgagctgggataggctagattaagctgggatgagctaggctaggctcactgagctaggctggaatagaccggtctaagataggctgcctgagctaaactagactgagatgaactgtaatgagctgggatgagctaagctaatctgggatgatctgggctaggctggaatggactgagccgagctggtctcagctgggctgggttgtgctgaatgggggtaaaccagactaggctacccagactaagctgggctgtgctgggccaagctgggctgagctagggtgggttgggctcgatggctgggctaatccaagctaggctgagctgagctggactgagctgggctggacggagctaggatgggattgactgagctgagctggactgaaatgggctgagctgagctaggctgagattcgctgagctgggctgagctggactgagctggactgagctggactgagctggactgagctgggctgagctgagctaggctgagattcgctgagctgggctgagctgggctgagctgggctgagctgggctgagctggactgaaatgggctgagcagacctggacaatgcaaggctgcactgaactgtccggctaggctatactgggatgagctgagctgggctggtctcagctaggcttggctgtgctgcatggaggtaaaccagactaggctacccaagctaaactgggctggaccaggctgggctggactgagctgtgctgagctggactgagctgggctgggctgggctgagctgagccaggcttggtttggctgagctgagctgagctgagctggactgagctagactgagctgggctgagctgagctaggctggactgagctggactgagctgggctgagctgagctaggctgggtttggctgagctgagctgagctggactgagctgggtgagctaaggtagactggaattggctgagctaagctgagctggactaaactggactaagctggactgagctgggctgagctgagctaggttaggattggctgagctgagctggactgagctgggctgagctggactgagctggactgaaatgggctgagaagccctggacaaagcaaggctgcactgaactgtctggctaggctatactgggatgagctgagctgggctgggctaagttgacttgggctaggataaactaaactgggatgagccggggtgagctgcatgaggtaggctggaatggctgagctagactaggccaggctgagctggaatgagccgagttgagctgagctgagctgagataaacttagtaaggctagaatgaattgagctgagctaggctgggccgacctaaagttgctctgaggtaggttagacatggttgtctgagctgggctgagttaggctagctataccgtctgggctgacctaatatgcccatattagttgtaatgacgtgacctaggttgaaacgggcttgctgatctgggctggactgggccaaactggagttagtctagcctgggctgacttagtgtagcctgggcagagttagactggaatgggctacactgagctgaactaggatgggatgggaagggataggctgaactgactgagctgggttcagttggccttgctgggctgagctgggctggatagtctagctgggctggccagaatgaggcagagctaggctggaattaggctaaacttggtttggctggttaagatgagctaacataaattaggctggctgaactacactggactgtaagctagcctgggtgagttcgcatggctggacgtcttcacagctctagtctgagttttactggtttgttctcctcagtgctgaggtaatagaaagactttggagtaaatgtgaaccaactcttgtttcatgggtccagactgtggcctcagtttgtcttatatgaacggagccacgccactcagtgtccaattctcatgccctcttctccttccctgattacctggtggaaactcacatgtacctgtagatagtgcctacatggacagaaccactgctcagatttagtcctctggccttttggtccactgcttgctgggtggatgggcaggtggctggagtggtgggtctgaagccaggacaaggcaagtataaagtaaaaacacaacaaaatggcccccaccccccagtgtaacctccaagccagctgttccccaaccattcctgccctgtgctggctgaggttggccgtccctgctcaggcccaccagttctggacctcctaacctgggactgagaacacggctctacccactgcccaagcaggagtggggctcagaaatctggggcgctagactgctcaggagcatagccatgtttacaaagacactcacagtgcgtacaagccctgctggaggcatctagccagatccttgaaaaagacaacctgcaggtcacgttcaaaatctatgcagccagtcggtcagctccaactgcgggtacatgatgcaacccctatgtgatactgggcctaggttctccggtataaagaagaaaaaggcatggtcctttctccagagattgtctcaagatgggcagtgtgaggactactatctcactcatgttttatgttccagagtccgcgaaagatcccaccatctacccactgagacccccaccatctccgtcaagcgacccagtgacaatcggctgcctaattcagaattacttcccatccggaactatgaatgtgacctggggcaagagtggaaaggatataagcgtcataaacttcccacctgccccagcctctgggccatacaccatgtgcagccagttgacattgccagctgcagagtgcccaaaaggaacatctgtgaaatactatgttcaatataacacaagccccgtcagagaattgagtgtggaatgccctggtaaagaaggttgggggggtctggggtgggctaagtcctaccttaacctggtatctggacccatatacccctctgaagcacacatcccactcagaaacctcccatgggggatggggggagggggtgtgaacaggcagagggagcagaggcctcagaacatccagaaaaggggacagcaaaggagaaaaggagactattctgatttgctaaaacttctatgttacaggtccaaaaccctccttagtctgccgccctcgcctgtcactgcaacggccagcccttgaggacctgctcctgggttcagaggccagcctcacatgtactctgagaggcctgaaagagcctacgggagccgtcttcacctggcagcccaccactgggaaggatgcagtgcagaaggaagctgtgcaggactcctgtggctgctacactgtgtccagcgtcctgcctggctgtgccgagcgctggaacaatggagagaccttcacatgcacagctacccaccctgaatttgagacccccttaaccggcgaaattgccaaagtcacaggtgggcccagatgcatacctgggacattgtatgatgttccctgcttgcgtacctgctttcttcctctaatacagatgctcagctgctcaggcccttgtgtcacagagggaaactggagctatccaaagaactgcccagaagggaagggcagagaggtctctgctctccttgtctgagccataactcttctttctaccttccagaaaacaccttcccaccccaggtccacctgctaccgccgccgtcggaggagctggccctgaatgagctcgtgtccctgacatgcctggtgcgaggattcaaccctaaagatgtgctggtgcgttggctacaagggaatgaggagctgccctctgaaagctacctagtgtttgagcccctgagggagccaggcgaaggagccatcacctacctggtgacaagcgtgctgcgtgtgtcagctgaaacctggaagcagggtgcccagtactcctgcatggtgggccacgaggccttgcccatgagcttcacccagaagaccatcgaccgtctgtcgggtaaacccaccaacgtcaacgtgtctgtgatcatgtcagagggagatggcatttgctactgagccaccttgcctgcccctactccttaaataaactctgtgctcatccaaagtatccctgcacttccatccagtgcctgtccatcatccttagggtctacaaaacactgggaggggtcagggcccagggaaggaggaacccccaccacctgagcttgtaaggcctcagagactctgaaggacctacatgcctagagtatatgtgtatgcatgtatacgtattagtgagtgcctttgcgtgtgtacctgtgtgtaacaagagaggagtgagtttgtgcgtgcctacgggtttatataggtatgtatatgggcataagtgcatacgcctttaagtgtgagcatatctgtgtccccgtgagcacatgtgtgtctgtgtatgcctatgagtgtgcacgtatctgtgtatgctcatgttggtggaaacatgtgtgcctatagtgtgtgtacctgccaggtggatgtgcaatgaaagggaggtgagaatgggggtgaagtccgagatgagcagattcagccaagacaggcaaacctcaggggagagtcccaagagcagtgggttgctgcagaggtactctgaatggtacttctgaatggtggtgtggctgtctgagtataagattacagcttttgtcccaaacaagaaagggatagatggagcaagagagtagcaagaccaaggctggtactgcctgggagtcacaataggaacggtagaggagtgaggagatgaatccaaggggcactgggaagaagatgccacccaccctcagtgggccagccctgaatggagacgtgcatagccactcagggtgaccactgactcatgagaaagagacataacatggcacagacagccctcagcagcaccctgctctgcatatatgcacatgggcatacaccctggtctgcatacaggtacatgggcatacacgcacatacatttgcacactcacacagacccgaaccctggaggaggacgaagttcacagcccacacgcagcttctggaaagcaatgggagtcccctcccaagcccaaccatgacaactcatggacaagtctataagctcctccaggtggcccctttctaacctaagtctcccttcccatcctgagcccaagtataacaaaccagaaacagggtatgtggcaagctgggaaaagacaggagcaggccatagagaccactctcacacaggccttggcctcctccatgggcacccctagaacacaaagttctacaaccaggtacacttggcacccagatgcccacaagagggcagtggggcccctgctcctgtctcacgggccttcagaacctctccaggggcctggtttctagcaacttccctctgctgtcagagcaaggcccatgcacaccctggataccctccagcttgaaagtccacttccccgaggatagcaaaagcgacaggccagctttggaaacctgacccagaaaagcacgatagccacccatggaacccaaggcctggtccaaaacagaattctagtaaggaggagccaataggtgaaagactgaacacacacagggagagaagacagaggagcacgatagtcgagagaggggggctggtgggtgaggcgatgagtgagtgactggaacaaggttgggtggatatgcagatgaatgatgggaatggtggatggactgatggatggctgcagtgacagaaatatgagtgactgagtatcggcacacagtccctacctccacttaaaatcaaagttctatgcgcggagactctgagggcagtggggttgtctctaccgggagactttagtgttggttaacccccccccaagttctttataatgcaacagaatcctctgaccacatgtccaccccttggtattccaacctcggcccagaaatcaccttggcctgtatctgtttgagagtgtccgatcttaccgaaccctagtacccaggccaagttcaacctaagaactggggcttttgtgaggtgttgctaaatgtctagagaggtctgagacaagtggccttgggctcaaactcttctcagagcctcaaagacagaaacaactctcttaccatgatagttctctaattaagatcccctgagggaaagagagagagtcaggtcttggggggcatctcaagaacttcaaggattccagccccttacctgggaccctgccttctcattatcccagaacaagtcccttctcagagataaggaacccctgccaccaccgtccccaaagcccaagggggcatagaaacagaggccttaagcctgagcccccatccccatgggtttggatctagaaggtcatctatgtcttacagaatgccaagagccaccttcctacgtgatactggaccagtcacaagacatcctggaggaagagaccccgggtgccagtctgtggcccaccgctgtgaccttcctcaccctcttcctactgagcttgttctacagcacagcactcaccgtcacaactgtacgaggcccatttggcagcaaagaggtcccccagtactgaccaggagccagccacaggtggctgtcatggagacggtggggtacagggtgggggcaggggccttgaggatttactcagcccctccacatgtggccttgcaacccttcacagacatcaaggaagtggaaggaagtagaaggaaattatggcagcacttcctgggtttaacccagtcttccagaagccaggctgagacctcagcaaaagcaaagacataacccaactccaggatcctcccctctggctgaccacttgtgtctttgcacggatgaagcttggagaaagtcctctatgtttcagagactgatgtgacagcttcccacccgactcccatactttgctgagcaataaactggtgcaaaagcacagtttcttactctcaaaaacaaaagttaacaaaggattgggtgagggggtcagagatagtgtggtggtgccatgctaaactgttgcttacggtatagaatgtggcagcattgggcagggcagacacagggtgaccactgtctagtatccgagacaaccgtgtgtagctgtagccaagatgaacactgactgacttcaacaagtatttgtggcctcttcagacccaataccaggccattagcttgatctctggacctgacttctaaacatttggcctctgtgaacacccttgccaaacactggtcctggttgtgaaccttggtcctgaatactgagccttatcttggtaactgaaccataatcctgatccctgacctcagtcacgatcatgaaaccctggtcctggccactcgttccaataactggtccctagtcctgagccctgagtcctggtccaggtcactgaatcctggtcatgatcaatgggtttggtcctcattcctgagcctagtcttgatcactgatcactggttctgatcattaacaactaacctgatcactagtccccattcctaatcactgggccgcgatactgatcactgaaccctgtttctaaacaatgtgtagtgaaatgtatggtaaaacctttgcatctggctttgagtgaaatgtttcggcagacctttgctatgttttgggttagtcaggaaaggctgagaaatggttttgaggctgtttgaaccttgaagaaatgttgtctccctggacaatctgcacttggtactacattaaggtttgcagttgcacacaccttggtcctaaacactcctggcagacttagaactcttacgtttgattatggctagccatagttgaaaagggctgagagttgtatgggtggtctgctctctctcgcagcaagggcaagatgactttggtagttgaaaactttcccagccccaactaactctgtataatgtttgaataaagtaacggcagtaggctagttgtggttaatttttattccaagaagaatgaacccctctgctccttcagaaaaggaaggcttagcattttggtgagcttctctctactgaggcacctatgaccaactcagtgttctttgattcctgtcaccacatccagtcttgatcactaagtgccagtcctcatcactaaaccctggtctccaccagtctgcttgggttctgataatcagactcacattctgataactgggccctgattctggtcactagctctttgccctggtcatggacatttgaccctagtccacggcactgagttctgggcatggaccctgggccctagtcctaggtactgggttctggttctaacaactaggtcctgtactgatcaatgggccctgacctagacattgggccctggtcctcaacatcaacttctaagcctgaactctagccccaaattctgcttatcaacactggtcctggaccttggtcctcatcacacatccattctctgagacccaaggaatcagtggtattttgcaagaagtccctttgatattccaagcctcattctcattaggaagatctcttcaggggattcctgcagaaggttccagaatccccaccacactgttcacatactgggctgcaactgggacagtgaccccttttgctcatggaaacaaagcaggcccaggccctgtgagctggagcctctggcctggggtctacagatgtggggtcagcattgtggagaaggtttgcagggcaggtgtgggggtagggcagggatggtcacattagcatcttgtttttctttcttctgaagtctctgttttctatcacctgctgaaacattcaaagtagctccaagctgaggccagctgagtcatcctgagcctatctcagcccaggtgcctcaaaacagagctactgttctgagaatcacaccaccctggaccaggccaggtgggtctggggctggatgaggggtcagagccaggggagccctgacagggactgagaaggccccaacccccatcactcaaggttctccacaaccatccacagtcatgccttagtgaggccatgttctgtcccaatgagaacaagtccaattaagattaagtctggtcttcccagggtcattcagtgtcaaggagtgtcaaccaaggccagccaaggccagcctgaggtcagccagcatcacccaaggacacacaactattctagtagacaactagaatagtcagctcaacagggccctggtgatgcaaaatggagagtgtattcctgccagacagggctccacagataggctccctcactgcatatgacctccctgaatgtttcccacactgcagttggttctagactacttcttgataagcatgcagaaagataacaggataagaaattttatgcagagaacagaagtatctacggaatagaatagaagatagatagtagaagtctgctacaggccccagtggagtctctttgtagagtcaagagatcaaacctaaactgagtctcaggattgagtccagtacagaagcaaccttcaggatgctaaagaccatacaggcaatggacagaatggagtccagacagaccaatgagtggacagtccaatctcacataatgaaccatgtcaagagcagatagtgagccaaagaaggctctgggacactcggagattctcggcctctggatctcctgatgtatataccaggtgatcaagtgacagtctagtggagccattgccatcacagtgtcaggtgtcctccccttcatgggttccggtgaggatgtggcacctccctttagttggacgtgtacaataaattctcaggcctggtatgatttttaatgatccatgtgtttctatagtcttaattatctttaataaaattatagggtgacaccaaatttagggataagttatttatcaggctgtgcctttggaaggtgacgttatttacatagccaccaaggtgcccagtcatcggcccatcttccaaacggagtcaagggccatttgaaacagtgaaatccctcagggcaagggacacaacatggaggaatttaaaacagagtacagcttgatcttaacacacacacacacacaaacgtaagagatggaaaaggggatcaagggacacagaagtacagagaaaacaagacagtaagggatgtagagatgagaggtaaccacagggaaaggtgagacacaaagacgagaggagaaagacacagggacagaaagacccatgcaagcaagagagacagacataaggaagaaaaggcgagaagagacagacaaaggtgcagcaatgtggcccacctggtactcacaagaaggccctggcacacactccgatgagagccatgcacctacaaacacgtagacacagctccacacagacacacacggcatctgcacaactgtctgaacctcaaacaggtctgcccactccctctcctccaggcctttgtccttaggaaggcacgctgagggtaactcagtcgggatacttctgattggggctcactgaacagcctgaggctgggtccacagttgctctcactgtctggccctgtaccccaggtcatgcttcagagggaattaactgaatgcagtaaacaccgtctgtggtcagcatgtactaagggatagaaccctatcaggatttgtccaactaaggtccaaatacagagtgaagaagacgatgggggagatcagatggcagatgggagcactctggatagagctcagggatatggtggctgaggaacattacagctgccaggcttggcctttcatctcagctctaggtcaaggggaactacccaggtctctgctttgttgctggtaactatacctaagtctaagaacctcagtaagacacagaaccagtaagacgacagcctccatcgataagaaagaaaggagaaaggcagaatggataagtctctggacagatgagagcctacacccaaaaacagttcgttcagccagttaatagggtgtagccctagcacacgagagaaaacagttccacaggtgtaagggagtaaatctgtgcgaaggggtactgcttgagctcctcatggcctggtccagaagcagaagctgggcaggggcaaaggacagggtaaggcagggagacaggggcatgaaggagcctttgggactgtgtggtgagaactaggctgtgcttttactgagcctgagtttgtggcagttgcctcatggggaaggcacccagaggtaaggcagaggaaaggagtaactagggctgagggcaccacagggtctgaggaattagaggcagctatgacccatttgtcatggtatttggacatgtacttcatggacacagatctgagaaccaggcctggctctcactaaccagcaggaggtgtcccacttgtggctgtaggtctttcagcacaccatgccatgggcctctcacactggacgatctgtctgaaaggctgatgttgggaggtgggagcccaggcctggggtctgggacactgggtgacagaggtgtccagaatgtagagtgctcagagtgtgggtggggacaagctgtagagtgtccccatgaggggacaggctgagatagggactgaagtccatctacaggcttaccacactccatgctctggatgagagcactgagctctgccaccctacaacagcaggcagagcggcctccatgctaggaaagccaggcagcagggacagagttcctggatggggcaggtggaattgtctctgctcggcatcaaactaagtggaccttcagcagtaaggtcttactgtctagtcatggtggacagccaggaacatagtcaatgaacagcctgctttgtttggattcctctggagacttcctgatcaataacttgtaggcctccatgtttcatgtgacaacttacatctctctatgtataacatgggctttctgtgtagtcctgggtatcctagaacaccctgtgtagaccaggctggcttcaaacttgggacatcctcctgtctctgccttctaataaatgctgggattaaaggctgtgccaccacacacaatctaacccatttcttctgggaataacactgttcacccagccatacactgagttaaaattccttaataaatgttagttcatttacaaaatagtggatttccataaggcttcttcatggatcctaatccaacttttaccttctcttttccccaatcctccaatccccctattcccacttaaatctgaaatccccctccctccattttcaagctgcctgtgttctatgtcccctcatattgtttttttcttgtgtggaggtttgcagatttgaatgcaggaacccttcactggggctaagcctcctgccacccagcacttcccatccccacacctcctcacgcttgatttagcccatgtcccctcatgtgtatgggtgtttctcttcagtctgaggcattactccccgtgtcctctggagagctgcctactgtcacagatacctttcttctgtttctgctagggaaagcttttatttccccttgaattttaatcattgtctgggtgtaataccctgggttgagagctgtgttctttcagaacttggactacgtctatccaggcatctggctttaaagtttctactgtggggctgcagagatggctcagtggttaaccacacatttcttcttgcagaggacttgggcttgattcctagtacctccgtggcagctaagaaccatctgtgactccaactgcacaggattcgatgcccttttctggaggtcatctggagtagtcagctcaacagggccccgggatgcagcatggagagtccatgctgacaggcagggctccacagagagagaaagacagaaacacaggccactgaaagagacagtaatggactgaggggacagagagaaacacacggacagacagacagagataacaaaacaccgacactcatagacacagagaagagaggggacagggaagttttgagagcaatgggtaggaggtgagagagacacagaggcaatacatacagagagtgactccagaagacagagtctgagaggagacactgcaagagacagagaccccaaaagggttgagagcactggatgctttcacagagaatccagattcgattcccagcaggctcatggcagctcatactgcaatcccagttccagagtgccctgaaggatccttcatgcatgtggagcacagaagcgctctctctctctctctctctctctctctctctctctctctctctctctctcagatgaaagccatgaaccagaagacagagacatgagtgaacactcctcagagacatagccacagcactcacacccagttccacacagacacatacagcacctgcctgcctgatccaaaccccaaacccattgacccactccctctcctccaggtctttgttctcagagtagcacactgagggtagctcagcctggatacttcccaaggggcctggacacacagcatgcatctctggtccacagcccccatcccttgttggccctgtaatccatgtgatgtctcaggagaagatgttgtctgagagcagggcctggtacagtgtccctggtacagtgtccctggtacagtgtccctggtacagtctctctagtaaagtctctctggtacagtttccctggtacagtcttcctggtacagtgtccctggtacagtctctctggtaaagtctctctggcacaggatgcctagtatagtctttctggtacaatctgcctggtacagtctgcctagtacagtcttcctggcacagtctatccctggtgcaggcttcaggtcaggcccaagtgtgaagagtgcagaagacagtgggcagagctgagagagcgctagtcagttttgttcagagaacagtgatggccgctccaggctactggacatcccaggtgtgcttcttacacttctcaaagctgtgggaacacaaccgaccctctactcacttcagtgtaattgcctatagcagggcatgcctctgggcatcagggagtcacacagaggcaggtaagactctagacctggggactgagaggggaaggcatgtacaagagggcctcatccttaggacacagggattcgaggcctctggatagccagtgagcaacatatgcagagtgatgaggccccaggagtctaatggacgccaggaggtcacagagctagaggcctggagggctagagtctgtgggaagggggactgcttaggttcttcccacccatgtccaggagcagaggctgggcagggccacaggacagggtaaggcagggagacaggggcatgaaggagcctttgggactgtgtggtgagaactaggctgtgcttttactgagcctgagtttgtggcagctgcctcatggggaaggcacccagaggtaaggcagaggaaaggagtaactagggctgagggcaccacagggtctgaggaattagaggcagctatgacccatttgtcatggtatttggacatgtacttcatggacacagatctgagaactaggcctggctctcactaaccagcaggaggtgtcccacttgtggctgtaggtctttcagcacaccatgccatgggcctctcacactggacgatctgtctgaaaggctgatgttgggaggtgggagcccaggcctggggtctgggacactgggtgacagaggtgtccagaatgtagagtgctcagagtgcgggtgggaacaagctgtagagtgtccccatgaggggacaggctgaggtagggactgaagtccacccaaggctcaccacactccatgctctggatgagagcactgagctctgccaccctacaacagcaggcagagcggcctccatgctaggaaagccaggcagcagggacagagttcctggatgggacaggtggaattgtctctgctctgcatcaaactaagtggaccttcagcagtaaggtcttactgtctagtcatggtggacagccaggaacatagtcaatgaacagcctgctttgtttggattcctctggagacttcctgatcaataacttgtaggcctccatgtttcatgtgacaacttacatctctctatgtataacatgggctttctgtgtagtcctgggtatcctagaacaccctgtgtagaccaggctggcttcaaacttgggacatcctcctgtctctgccttctaataaatgctgggattaaaggctgtgccaccacacacaatctaacccatttcttctggaaacaacactgttcacccagccatacactgagttaaaattccttaataaatgttagttcatttacaaaatagtggatttccataaggcttcttcatggatcctaatccaacttttaccttctcttttccccaatcctccaatccccctattcccacttaaatctgaaatccccctccctccattttcaagctgcctgtgttctatgtcccctcatattgtttttttcttgtgtggaggtttgcagatttgaatgcaggaacccttcactggggctaagcctcctgccacccagcacttcccatccccacacctcctcacgcttgatttagcccatgtcccctcatgtgtatgggtgtttctcttcagtctgaggcattactccccgtgtcctctggagagctgcctactgtcacagatacctttcttctgtttctgctaggggaagcttttatttccccttgaattttaatcattgtctggctgtaataccctgggttgagagctgtggtctttcagaacttggactttgtctatccaggcatctggccttaaagtttctactgtggggctgcagagatggctcagtggttaaccacacatttcttcttgcagaggacttgggcttgattcttagtacctccgtggcagctaagaaccatctgtaactccagctgcacaggattcgatgcccttttctggaggtcatctggagtagtcagctcagcagggccccgggatgcagcatggagagtccatgctgacaggcagggctccacagagagagaaagacagaaacacaggccactgaaagagacagtaatggactgaggggacagagagaaacacacggacagacagacagacagacagacagacagacagacagacagacagagatagataacaaaacaccgacactcatagacacagagaacagaggggacagggaagttttgagagcaatgggtaggaggtgagagagacacagaggcaatacatacagagagtgactccagaagacagagtctgagaggagacactgcaagagacagagaccccaaaagggttgagagcactggatgctttcacagagaatccagattcaattcccagcaggctcatggcagctcatactgcaatcccagttccagggtgccctgaaggatccttcatgcatgtggagcacagaagctctctctctctctctctctctctctctctctctctctacactgtccccatgaagggacacgctgacgtacggactgaagtccacccaaagctcaccacactccatgctctggatgagagcactgagctctgccaccctacaacagcaggcacagcggcctccatgctaggaaagccaggcagcacggacagagttcctggatggggcaggtggaattgtctctgctcggcatcaaactaagtggaccttcagcagtaaggtcttactgtctagtcatggtggacagccaggaacatagtcaatgaacagcctgctttgtttggattcctctggagacttcctgatcaataacttgtaagcctccatgtttcatgtgacaacttacatctctctatgtataacacgggctttctgtgtagtcctgggtatcctagaacaccctgtgtagaccaggctggcttcaaacttgggacatcctcctgtctctgccttctaatccatgctgggattaaagcctgtgccaccacacacaatctaacccatttcttctggaaacnnnnnnnnnnnnnnnnnnnnnnnnnnnnnnnnnnnnnnnnnnnnnnnnnncagtggcacacacacatacacacacacacacacacacacacacacacacacacacacatacactctaatgaaggcagtggcgcacacacacactctcagatgaaagccatgaaccagaagacagagacatgtgtgaacactcctcagagacatagccacagcactcacacccagctccacacagacacatacagcacctgcctgcctgatccaaaccccaaacccattgacccactccctctcctccaggtctttgttctcagagtagcacactgagggtagctcagcctggacacttcccaaggggcctggacacacagcatgcatctctggtccacagcccccatcccttgttggccctgtaatccatgtgatgtctcaggagaagatgttgtctgagagcagggcctggtacagtgtccctggtacagtgtccctggtacagtgtccctgggacagtgtccctggtacagtctccctggtacagtctccctggtacagtctctctagtaaagtctctctggtacagtttccctggtacagtcttcctggtacagtgtccctggtacagtctctctggtaaagtctctctggcacaggatgcctagtatagtctttctggtacaatctgcctggtacagtctgcctagtacagtctccctggtaaagtctgtccctggttcaggcttcaggtcaggcccaagtgtgaagggtgcagaagacagtgggcagagctgagagagcgctagtcagttttgttcagagaacagtgatggccgctccaggctactggacatcccaggtgtgcttcttacacttctcaaagctgtgggaacacaaccgaccctctactcacttcagtgtaattgcgtatagcagggcatgcctctggacatcaggaagtcacacagaggcaggtaagactctagacctggggactgagaggggaaggcatgtacaagagggcctcatccttaggacacagggatttgaggcctctggagagccagtgagcaacatatgcagagtgatgaggccccaggagactgatgggcaccaggaggtcacagagctagaggccgggagggctagagtctgtgggaagggggactgcttaggttcttcccacccatgtccaggagcagaggctgagcagggccacaggacagggtaaggcagggagacaggggcatgaaggagcctttgggactgtgtgatgagaactaggctgtgcttttactgagcctgagtttgtggcagctgcctcatggggaaggcacccagaggtaaggcagaggaaaggagtaactagggctgagggcaccacaggatctgaggatttagaggcagctatgacccatttgtcattgtatttggacatgtacttcatggacacagatctgagaaccaggcctggctctcactaaccggcaggaggtgtcccacttgtggctgtaggtctttcagcacaccatgccatgggcctctcacactggacgatctgtctgaaaggctgatgttgggaggtgggagcccaggcctggggtctgggacactgggtgacagaggtgtccagaatgtagagtgctcagggtgcgggtggggacaagctgtacagtgtccccatgaggggacaggctgaggtagggactgaagtccacccaaggctcaccacactccatgctctggatgagagcactgagctctgccaccctacaacagcaggcacagcggcctccatgctaggaaagccaggcagcagggacagagttcctggatggggcaggtggaattgtctctgctcggcatcaaactaagtggaccttcagcagtaaggtcttactgtctagtcatggtggacagccaggaacatagtcaatgaacagcctgctttgtttggattcctctggagacttcctgatcaataacttgtaggcctccatgtttcatgtgacaacttacatctctctatgtataacacgggctttctgtgtagtcctgggtatcctagaacaccctgtgtagaccaggctggcttcaaacttgggacatcctcctgtctctgccttctaatccatgctgggattaaagcctgtgccaccacacacaatctaacccatttcttctggaaacaacactgttcacccagccatacactgagttaaaattccttaataaatgttagttcatttacaaaatagtggatttccataaggcttcttcatggatcctaatccaacttttaccttctcttttccccaatcctccaatccccctattcccacttaaatctgaaatccccctccctccattttcaagctgcctgtgttctatgtcccctcatattgtttttttcttgtgtggaggtttgcagatttgaatgcaggaacccttcactggggctaagcctcctgccacccagcacttcccatccccacacctcctcacgcttgatttagcccatgtcccctcatgtgtatgggtgtttctcttcagtctgaggcattactccccatgtcctctggagagctgcctactgtcacagatacctttcttctgtttctgctaggggaagcttttatttccccttgaattttaatcattgtctgggtgtaataccctgggttgagagatgtggtctttcagaacttggactttgtctatccaggcatctggccttaaagtttctactgtggggctgcagagatggctcagtggttaaccacacacgttgttcttgcagaggacttgggcttgattcttagtacctccgtggcagctaagaaccatctgtaactccagctgcacaggattcgatgcccttttctggaggtcatctggagtagtcagctcagcagggccccgggatgcagcatggagagtccatgctgacaggcagggctccacagagagagaaagacagaaacacaggccactgaaagagacagtaatggactgaggggacagagagaaacacacggacagacagacagacagacagacagacagacagacagacagacagacagacagacagacagacagacagagataacaaaacaccgacactcatagacacagagaacagaggggacagggaagttttgagagcaatgggtaggaggtgagagagacacagaggcaatacatacagagagtgactccagaagacagagtctgagaggagacactgcaagagacagagaccccaaaagggttgagagcactggatgctttcacagagaatccagattcaattcccagcaggctcatggcagctcatactgcaatcccagttccagggtgccctgaaggatccttcatgcatgtggagcacagaagctcgctctctctctctctctctctctctctctctctctctctctctctctctctcagacacacacacacacacatacacacacacacatacactctcaaatgaaagccatgaaccagaagacagagacatgtgtgaacattcctcagagacatagccacaacactcacacccagttccccgcagacacacaaatcacctgcctccctgttccaaatcccaaacccattaactcactccctctccttcaggcctttgatttcagagtagcacaccgagggtagctcagcctagacacttcccatgggacctggttacatagcgtgcacagggccacctcttgttggccctataacccatgtgatgattcaggaaaagatgttgtctgagagcagggcctggtacagtccccctggtacagtccccctggtacagtctctctggtacagtctccttggtacaggcttcctgatacagtctctctggtacagtctctctggtacaatctgcctcgtacagtctccctgatacagtctgcctggtacagtctctctggtacagtctgcctggtacagtctccctggtacagtctccctgatacagtctgcctggtacagtctctctggtacagcctctctggtacagtcggcctggtacagtctccctggtacagtctccttggtacagtctccctgatacagtctgcctggtacagtctgcctggtacagtctctctagtacagtctgcctggtacagtctgcctgatacagtctgcctgatacagtctgcctggtacagtctccttggtacagtctgcctggtacagtctgcctgatacagtctgcctggtacagtctctctggtacagtctccttggtacagtctccctgatacagtctccttggtgcagtctccctgatacagtctctctggtacagtctgcctggtacagtctccctggtacagtctccttggtacagtctccctgatacagtctgcctggtacagtctccctggtacagtctccctggtacagtctgcctggcacattctatccctggtgcaggcttcaggtcaggcccaagtgtgaagggtgcagaagacagtgggcagagctgagagagcgctagtcagttttgttcagagaacagtgatggctgctccaggctactggacatcccaggtgtgcttcttacacttctcaaagctgtgggaacacaaccaaccctctacccaattcattgtaattgtctatagcagggcatgcctctgggcatcagggagtcacacagaggcaggtaagactctagtcctggggactgtagaaggtatgtaagtacaacagggcctcatccttggaacactggtgtctcaggcttcaatacagccagtgagaaacacatgcagagtgatgtggccccaggagactgatgggcaccaggaggtcacagagctagaggcctggagggctagggtctgtgggaagggggactgcattcactcttcctatgcttgcccaggaacaactgtctatgcagggccacaggacagggtaaggcagggagacaggggcatgaaggagcctttgggactgtatgatgagagtctaggctgtgctctgactgagcctgagtttgtgacagctgtctcatgaggaagacacccagaggccagacagaggaaaagagtaatcagggctgagcggaccacagggtctggggacgtggaggtggctggcctggctcccacaggccctcagatggagctgcacatcatcccatagcatatcactctggagggcttatcaaaatggttgtgctgtgggactgggtttcaggactgaggcctgagatactgggtagcagaacatgttcagtatacagggtgctcagagtacgggggggggggggacaagctctgcagtgttcctccatgttgggacaagcagaaagaggtcttgaagctgtttgtccatccataggcctaacccatactggccctgctcatggccctagcttgggccacatatctagtgcccactgaatcatcaccatgaagactgttggaaaaccagagcctctgatgtcttcctgccttgcttgctctccctgactctcatagctcacacaggctctgccctggtccaccactgtcctcaactgtaaaccatgccaggcacagagagcaaggaatgtggtggtctcagactgtcacacacaacaatcttgtgcctttcacatccacacgcacaagcatgctcatacccctctgtcaggggtcagtggggtcttccttgggctcactcccatttctagctgctccttggtattggtgactgcggctgctgtgtcggtggctgccagagatgcttgatcggcatgacctcagatataggaatggcctggggtcaacagagtgcacacacttagggcactggccagagttctatgtagaccaaggcctctcttcctagtgtgttatttcacaaaaccttatgcaacaacatcttctattccttttattcctctttgtctgctaatggggaattttctagaaagagtgtcccctctctgtcttcctgctgtgtagacagatcttgtaggtgtgatcacagagtggtgtttcccttcttggccattttcaggccaggaactcagggccagagacagaaagtcaggaaggtaggaaagacagggagacataataaaggtgagatggagacagagaaagacaaagggagaaaagcacaggattgcagggagagacaaggagacgcccgacggaaacagacatcagggaaaagacatgattgttcctttagtaaattgctttccggagaaaagagacagcagagagacatggataggcacacaaagatacaaggagagagacaggaaacagagaaagagagaaacagagatggagaaacaacgagggagagagaagagtagagagaaagacacggagaaaaaaaatcaagaaacagaaaagacaaaagataggaagacagagaaataggccagaaatacagacagacagagagatgcctgaagatgttctctctcacctagagaaagaaagcacaggcagagataatacagagagagagagagagagagagagagagagagagagagagagagagagagagagagagaggagagaaagaggagagacacggtgttagaggagaaagcattatgttttgatagagacagagatacagcaactgaggaacagactgagcagaaagaatcccactcagagagagacagaggctaagctgggagaggcaggggtggccagagagggagacagaggagagcctgtgggacaggtcagacaccatcttggaagacccagtgacaagccagggaggtgacaggttagtgcagtttctaccccacagtccacaggctggagccacaggcctgtgtccatgtggccacaggctagctcccagcctgccaagcctgtctgtggagggattgcggagtggggctgggctgaggcaggccaggatttttccagtggagcagccagtgactgggctgagggtcactgcccaccatccccgtgattctgggtagacccaggacctggagcacacacagccttcctgtctctcccacttccctggggtgtttggaccttgcctatctcctgtcattccctcctagggtcagattccagcagtgtcgataaatgggaaaacactgaattcaatgtcaccgttaggggtcatggaacccccagccccatccccaaagctggtcaacctggccagggtggggtgaacctgcagctgcaggtgggggaatcattgatgctatttttggctcagagaatgagaaacatgtttttctgcatggaacaaacatccatttgcatgtgccccgagggccaaccctgcacagagtgagtcactcggcaggtgtgtgtgtgtgtgtgtgtgtgtgtgtgagagagagagagagagagagagagagagagagagagacagagacagagacagagacagacagagagacagagagacagagagagagacagagagagacacacacagagacagagagacagagagagacagagacagagagagacacacacacagagacagagagacagagagagagatgttgtgagcaagccctgtttcaggtactgatatctgtgcccccgtgccccagcccatgtggaaaaactacccttaggggcccattaactcatcacagtccaggccatcatggtgagccctagctgacctaagcaggttccaccctaaacatgaaggaaaataataaaggccatctgttacccagaatcctagggatggtgggcagtgaccctcagcccactcctggccgctccactggaagaatcctggcctgcctcagcccagccccactccgcaatccctccacagacaggcttggcaggctgggagctagcctgtggccacatggacacaggcctgtggctccagcctgtggactgtggggtagaaactgcactaacctgtcacctccctggcttgtcactgggtcttccaagatggtgtctgacctgtcccacaggctctcctctgtctccctctctggccacccctgcctctcccagcttagcctctgtctctctctgagtgggattctctctgctcagtctgtcagccatagttggagagagtccatctatgtttgcctctgtctctgccaattccatcagaggtctctctactaacacttgcctctgcatgtgtctcttggtccttctcctgtcttcccatctctctatctcctcatctctctgtctttctgttactccctgtctctgtctctctgtcttttctctcactgtctttatctctctgcctgtttcatggacttttctctgtctctctgtctctgtctctctgtctctctctctgtctctctctgtctctgtctctctctgcccctatctcttggtctctatctctatcttcaactccctatctttgttcctcatactcacatttacctctttcccaagcccccagtctccaggtctgcctgtttctgtctctcccttgccatgtttccctgttttattctctctcctcctgaatgctctggcttgaaactggccaagaagggaaacaccactctgtgatcacacctacaggatctgtctacacagcaggaagacagagaggcgaccctctttcaccctacagtgtctggacttggttgattccaggttactcctatactcaagtccgggactatggtggtcaagcatctctggcagccactgggacagcagctatagccaccaacatcgagccctgttagctaccaacattagctcctcaaagaggttgggtctataggcctctggtgtgaggagatgttgacagtgagaattagttcccaaggaggacaccactgtttcctgttagatggagaactacagtgggtacgaacatgcttgaacacatgagtgtcaaatgcacaagactgttgggtgtgtcacccttcccctctctgttcatggcatgactgcacactgaacacaatggtggattgggacagagtctgtgtgagttgagaatcatgaagagtgtagacacttcaaggatagtgtagacccttctagttcgtggtgatggctcacttggcactgagtttctgaccccacagggaccatggacaagggcagtatgggctgtgcctatggatacaaaagagacttcgaagcctgtattagcctgtcccctcatggaggaacacagcacagcttgtctctacccacactctgagtactctacgtcctggacacctctgtcacccagtgtcctaggtcccatccttggctcccacatcacatctgcctttcagacagatcttccagtgtgacagacccatttcatggtgctgaacaacataaacccatttcctgagggttggtgagagccggcctggttctcagatctgtgtccatgaagtacatgaccaaataccatgacaaatgggtcatagctgcctctaattcctcagaccctatgggccctcagccctggttactcctttcctcggcctggcctctgggtgccttccccatgaggcagctgccacaaacccaggctcagtcagaacatagcctagttcctaccatacagtcccaaaggttgcttcatgcccctgtctccctgccttagcctgtctgtgctcctgcacagacaagagttcctgggcaagcataggaagagtgaatgcagtccctcttccaacagaccctagccctccaggcctctagctctgtgacctcctggtgtccattagactcctggggcctcatcactctgcatgtgttgctcttgtacatgccttcccctctcagtccccaggtctagagtcttacctgcctctgtgtgacttcctgatgtccagaggcatgccctgctatagacaattacactgaagtgagtagagggtcggttgtgttcccacagctttgagaagtgtaggaagcacacctgggatgtccagtaacctggagcggccatcactgttctctgaacaaaactgactagcattctctcatctctgcccactatcttctgcacccttcacacttgggcctgacctgaagcctgcaccagggacagactttaccaggcagactgtaccaggaagactgtaccagggagattgtaccaggcagagtgtgccaggcagactgtacaaggcacactatatcagagagactttaccatgcagactgcaccagggagactgtaccagggagactgtaccagggagactgcaccagggagactgtaccaggccctgatctcagacaacatcttttactgagacatcacatggattacagggccagcaagaggtgggggctgtggaccagaggctcatactgtgttaccaggtcccatgggaagtgtccaggctgagctaccctcagtgtgctactctgagaacaaaggcctggaggagagggagtgggtcaatgggtttggggtttggatcaggcaggcaggtgctgcgtgtgtctgtgtggaggctgggtgtgagtgctttggctatgtctctgaggagcgttcactcatgtctctgtctctggttcatggctttcatctgagagagagagagagagagaaagagagagagagagagagagagagagagagagagagagagagagcgcttctgtgctccacatgcatgaaggatccttcagggcaccctggaactgggatttcagtatgaactgccatgaacctgctgggaattgaatctggattctctgtgaaagcatccagtgctctcaacccttttggggtctctgtctcttgcagtgtctcctctcagactctgtcttctggagtcactctctgtatgtattgcctctgtgtctctctcacctcctacccattgctctcaaaacttccctgtcccctctgttctctgtgtctatgagtgtcggtgttttgttatctctgtctgtctgtctgtctgtctgtccgtgtgtttctctctgtcccctcagtccattactgtctctttcagtggcctgtgtttctgtctttctctctctgtggagccctgcctgtcagcatggactctccatgctgcatcccggggccctgctgagctgactactccagatgacctccagaaaagggcatcgaatcctgtgcagctggagttacagatggttcttagctgccacggaggtactaggaatcaagcccaagtcctctgcaagaacaacgtgtgtggttaaccactgagtcatctctgcagccccacagtagaaactttaaggtcagatgcctggatagacaaagtccaagttctgaaagaccacatctctcaacccagggtattacacccagacaatgattaaaattcaaggggaaataaaagcttcccctagcagaaacagaagaaaggtatctgtgacagtaggcagctcttcagaggacacggggagtaatgcctcagactgaagagaaacacccattcacatgaggggacaggggctaaatcaagcgtgaggaggtgtggggatggaaagtaatgggtggcaggaggcttagccccagtgaagggttcctgcattcaaatctgcaaacctccacacaagaaaaaaataatatgaggggacgtagaacacaggcagcttgaaaatggaggatgcttttagcattaaagatttacagtgtagnnnnnnnnnnnnnnnnnnnnnnnnnnnnnnnnnnnnnnnnnnnnnnnnnnnnnnnnnnnnnnnnnnnnnnnnnnnnnnnnnnnnnnnnnnnnnnnnnnnnnnnnnnnnnnnnnnnnnnnnnnnnnnnnnnnnnnnnnnnnnnnnnnnnnnnnnnnnnnnnnnnnnnnnnnnnnnnnnnnnnnnnnnnnnnnnnnnnnnnnnnnnnnnnnnnnnnnnnnnnnnnnnnnnnnnnnnnnnnnnnnnnnnnnnnnnnnnnnnnnnnnnnnnnnnnnnnnnnnnnnnnnnnnnnnnnnnnnnnnnnnnnnnnnnnnnnnnnnnnnnnnnnnnnnnnnnnnnnnnnnnnnnnnnnnnnnnnnnnnnnnnnnnnnnnnnnnnnnnnnnnnnnnnnnnnnnnnnnnnnnnnnnctcattcctctttttttggcggccgatggcggttatattccttgcgtctcccgtatccagaaataataatcattcaaaacggtgttctcctcagccagtgtatgccttttggattttgcttccagcagcaccgagtggagaggagaggagaggagaggagaggagaggagaggagagatgttcagttatccaaaactaaggatccatgaagaagccttatggaaatccactattttgtaaatgaactaacatttattaaggaattttaactcagtgtatggctgggtgaacagtgttgttcccagaagaaatgggttagattgtgtgtggtggcacaggctttactcccagcatttattagaaggcagagacaggaggatgtcccaagtttgaagccagcctggtctacacagggtgttctaggatacccaggactacacagaaagcccgtgttatacatagagagatgtaagttgtcacatgaaacatggaggcctacaagttattgatcaggaagtctccagaggaatccaaacaaagcaggctgttcattgactatgttcctggctgtccaccatgactagacagtaagaccttactgctgaaggtccacttagtttgatgccgagcagagacaattccacctgccccatccaggaactctgtccctgctgcctggctttcctagcatggaggccgctgtgcctgctgttgtagggtggcagagctcagtgctctcatccagagcatggagtgtggtgggcctgtggatggacttcagtccctatctcagcctgtcccctcatggggacactgtacagcttgtccccacccgcaccctgagcactctacattctggacacctctgtcacccagtgtcccagaccccaggcctgggctcccacctcccaacatcagcctttcagacagatcgtccagtgtgagaggcccatggcatggtgtgctgaaagacctacagccacaagtgggacacctcctgccggttagtgagagccaggcctggttctcagatctgtgtccatgaagtacatgtccaaataccatgacaaatgggtcatagctgcctctaaatcctcagatcctgtggtgccctcagccctggttactcctttcctctgccttacctctgggtgccttccccatgaggcagctgccacaaactcaggctcagtaaaagcacagcctagttctcatcacacagtcccaaaggctccttcatgcccctgtctccctgccttaccctgtcctgtggccctgcccagcctctgctcctggacatgggtgggaagaacctaagcagtcccccttcccacagactctagccctcccggcctctagctctgtgacctcctggtgcccatcagtctcctggggccacatcactctgcatatgttgctcactggctatccagaggcctcgaatccctgtgtcctaaggatgaggccctcttgtacatgccttcccctctcagtccccaggtctatagtcttacctgcctctgtgtgactccctgatgcccagaggcatgccctgctataggcaattacactgaagtgagtagagggtcggttgtgttcccacagctttgagaagtgtaagaagcacacctgggatgtccagtagcctggagcggccatcactgttctctgaacaaaactgactagcgctctctcagctctgcccactgtcttctgcactcttcatacttgggcctgacctgaagcctgcaccagggatagactgtgccaggcagactgtaccagagagactgtaccaggcagactgtatcagggagactgtaccaggcagactgtatcagggagactgtaccaggcagactgtatcagggagactgtaccaggcagactgtaccacacagactatactaggcatcttgtaccagagagactttaccaggcagactgcaccagggacactctaccagggacactgtaccagggacactgtaccagggacactgtaccaggccctgctctcagacaacatcttctcctgagacatcacatggattacagggccaacaagggatgggggctgtggaccagagatgcttgctgtgtctccaggccccttgggaagtgtccaggctgagctaccctcagtgtgctactctgagaacaaagacctggaggagagggagtgggttcatgggtttggggtttggatcaggcaggcaggtgctgtgtgtgtctgtgtggagctgggtgtgagtgctgtggctatgtctctgaggagtgttcacacatgtctctttcttctggtgcatggctttcatctgagagagagagaaagagagagagagagagagagagagagagagagagagagagtgtgttgctgccttcatttgagtgcttggtgggctccatgctgtacctctgccttccctgtgtgtctgtccttttgcctctcccttcctttggcctgtctctcttgtctgcatctgtctctcttgtctctccctctctgtgtctcttttctctcctgtctctgtgtctcttctttcctgtggtctctcctcatccccatgtctgcatcagtgtctatcagtctttaactctgtgtcctcttgttcccatttctgtccctctggatatttctgtctttctgtgtgtctgtcctcatctctcccagcgtccatgtctttgtgtccctttgtccccacacagtatcttctcaaatactctgtgtgcctggtcccctgtctctcattccttttctcactgctcccatcagtgtttctctgtgtctctgcttctgtgtctctgtgtgtctgtctcatgctatctctttctctctcattatctctgtctccctcagacttctctgtctttcttggtctctgtctccctctgtgtctctgtctttctgcatgtctaatgtctctgtgtctcccttagctcatctctgtctctctcaatattcccacaatcccctttattctttgtgtctctgtctctgtggtgtctctttctcagtctctctgtatttcgctctgtctctcagaatctctgtgtccctcatattatttttcgaagtgtctccctatctctttcagtaacactatttctgtttttctcagtctctctctctctctctctctctctctctctnnnnnnnnctctctctctcagaaagtctatggcacctcttctatgtgtgtcccactctggacctggatcaatcttccttcttggacctcagtttcatcagttgtgagacgataccttgccagaagtccagaggactgtctgtcctccatagtctagaccacctgtgatctgagagatattgggacaacggatgtgcagtgagggacctgcctttctgtggagccctgtctggctggaatacactctccattctgcatcaccagagccttgttgagctggctattctagttgtctactagaatagttgtgtgaccttgggtgatgctggctgacctcaggctggccttggctggccttggttgacactgaatgaccctgggaagaccagacttaatcttaattggacttgttctcattgggacagaacatggcctcactaaggcatgactgtggatggttgtggagaaccttgagtgatgggggttggggccttctcagtccctgtcagggctcccctggctctgacccctcatccagccccagacccacctggcctggtccagggtggtgtgattctcagaacagtagctctgttttggggcacctgggctgagataggctcaggatgactcagctggcctcagagtggagttattttgaatgtttcagcaggtgatagaaaacagagacttcagaagaaagaaaaacaagatgctaatgtgaccatccctgccctacccccacacctgccccgcaaaccttccccacaatgctgaccccacatctgtagaccccaggccagaggctccagctcacagggcctgggcctgctttgtttccattcagtgcctctgggaaaggcagatgagtaaaggggtcactctcccagttgcagcccagtgtgtgaacagtgtggtggggattctggaatcttctgcaggaatcccctgaagagatcttcctaatgagaatgaggcttggaatatcaaaggtacttcttgtaaaataccactgattccttgggcctcagagaatggatgtgtgatgaggaccaaggtccaggaccagtgttgataagcagaatttggggctagagttcaggcttagaagttgatgttgaggacctgggcccattgatcagtacagaacctagttgttagaatcagaacccagtgtctatgaccagagctcagtgatagggaccaagtcccaaggccaaatgatcaagaccaggacccagttgccaggaccaagatccaggtttcacaaccaaacctagttacgcagaccagaaaccattcgttggaatctggatctgaatcagagcccaatcacactactctaaaccagagttcagtgttgaggaccagggtacgtgatgagcccaagattcagagatcaagaggtggattcagtaattaagaccaggattcagagatcaggatcagggctcagttagcaggatcagggctcagtcatgtggtcatgggctcacggtccaatgtccatgcccaaaacacaactaaggacccagtggtcagaaccaaggcctgatgatcagagacaatacacactgctcagagctgaatttcagtggcaaggatgaagacataatgataaagactagggatcagtgagcagaaccagcgatgaggacccagacgcatctctgaagactagagtcagtgaccatgaccagttcaacgatcatgagtaggacttaattctgatcatacgagttcagtgatcacgaacaaggctcagtgatcatgacaagggctcagggaacaagagtgaggctcagcgatgaaaactggacctcagttatgagcccagtgatgagtaaccaggtctcggtcattagggccaggattcagtgataagaaccaagggtctctgcagggctcagtgcatcctctccccctgagactggacaaagccgcccagccacagggatggattctccagacaggcaacagcttcagggacagcccccccgtgatgcgccagagtaggggatacccaggggacttccacactctcaaagaagaaggggagaatggaacatgaagaagggactgtgaggggggaccgggaagtgggggacacagtgactgggatataaagtgaataaataaattaatggaaaatatcacatgggtgtagggaattttgaaagaataaataaaatgttaaaaatgaaaagaaaaaaagaccaagggtcaatgatcagggtgataataaataaataaataaataaataaataaataaataaataaataaataagaaaggaaagagagaaagaaaggaaggaagaaagaaagaaagaaagaaagaaagaaagaaagaaagaaagaacaaacgaactgaatgtcagaatttagggtaagatctcagtgatgaggatcagggatcagtggtttgaacgcagacacactgcccagggccattgttcaatgacgagagtcagggatcagctatcagaaccagggccagtaacgaaagccagggcccagtgaccccaaccaaaaaccagtgactaaaaccaaataaaatagaaactaggcagccacgatggtgcacacctttaatcccagaactcaggagtcaggggcagggggagttcaagacaaccctggtctacacagtgagttccaagacagccagggctacccagagaaaccctgtctagataacaaagactagaaaccatgagctcagtgatcagtggcagttcttgatgactaagaccatggtcaagaggactgatcagcaggactcagtggttagactcaggacatggtgatgatagcctctgttccagggatcagaaccaaggccaagggccaaggccatgactgagtcatcagaacagggcctctccatgagcactagtcaggcgcagccaggcctagcatgtcaatcaggcaaaattgggtatgtgtgtggtggtatgactgactatacatcgtcttagtatctgtctgaccccaccaccatcttccctgcctccgtccactcacagatctctgacgcgtcaccgcagggtaataactgatataattaaattgaagctctaatttgtgagtttagtatacatgcatttacttataatacagttttttagttttgctggccgcatcttctcaaatatgcttcccagcctgcttttctgtaacgttcaccctctaccttagcatcccttccctttgcaaatagtcctcttccaacaataataatgtcagatcctgtagagaccacatcatccacggttctatactgttgacccaatgcgtctcccttgtcatctaaacccacaccgggtgtcataatcaaccaatcgtaaccttcatctcttccacccatgtctctttgagcaataaagccgataacaaaatctttgtcgctcttcgcaatgtcaacagtacccttagtatattctccagtagatagggagcccttgcatgacaattctgctaacatcaaaaggcctctaggttcctttgttacttcttctgccgcctgcttcaaaccgctaacaatacctgggcccaccacaccgtgtgcattcgtaatgtctgcccattctgctattctgtatacacccgcagagtactgcaatttgactgtattaccaatgtcagcaaattttctgtcttcgaagagtaaaaaattgtacttggcggataatgcctttagcggcttaactgtgccctccatggaaaaatcagtcaagatatccacatgtgtttttagtaaacaaattttgggacctaatgcttcaactaactccagtaattccttggtggtacgaacatccaatgaagcacacaagtttgtttgcttttcgtgcatgatattaaatagcttggcagcaacaggactaggatgagtagcagcacgttccttatatgtagctttcgacatgatttatcttcgtttcctgcaggtttttgttctgtgcagttgggttaagaatactgggcaatttcatgtttcttcaacactacatatgcgtatatataccaatctaagtctgtgctccttccttcgttcttccttctgttcggagattaccgaatcaaaaaaatttcaaagaaaccgaaatcaaaaaaaagaataaaaaaaaaatgatgaattgaattgaaaagcgtggtgcactctcagtacaatctgctctgatgccgcatagttaagccagccccgacacccgccaacacccgctgacgcgaaccccttgcggcc

SEQ ID NO: 3 - DNA, 149681 bp, synthetic construct
  misc_feature 1..149681: note = RP11-115D9
  variation 2: note = n is a, c, g or t
  variation 11: note = n is a, c, g or t
  variation 13: note = n is a, c, g or t
  variation 17: note = n is a, c, g or t
  variation 19: note = n is a, c, g or t
  variation 23: note = n is a, c, g or t
  variation 31: note = n is a, c, g or t
  variation 35: note = n is a, c, g or t
  variation 38: note = n is a, c, g or t
  variation 41: note = n is a, c, g or t
  variation 45: note = n is a, c, g or t
  variation 47: note = n is a, c, g or t
  variation 49: note = n is a, c, g or t
  variation 51: note = n is a, c, g or t
  variation 56: note = n is a, c, g or t
  variation 58: note = n is a, c, g or t
  variation 63: note = n is a, c, g or t
  variation 65: note = n is a, c, g or t
  variation 67: note = n is a, c, g or t
  variation 69: note = n is a, c, g or t
  variation 71: note = n is a, c, g or t
  variation 73: note = n is a, c, g or t
  variation 76: note = n is a, c, g or t
  variation 78: note = n is a, c, g or t
  variation 82: note = n is a, c, g or t
  variation 87: note = n is a, c, g or t
  variation 89: note = n is a, c, g or t
  variation 93: note = n is a, c, g or t
  variation 95..97: note = n is a, c, g or t
  variation 99: note = n is a, c, g or t
  variation 101: note = n is a, c, g or t
  variation 106: note = n is a, c, g or t
  variation 108: note = a is a, c, g or t
  variation 121: note = n is a, c, g or t
  variation 124: note = n is a, c, g or t
  variation 132: note = n is a, c, g or t
  variation 138: note = n is a, c, g or t
  variation 145: note = n is a, c, g or t
  variation 151: note = n is a, c, g or t
  variation 157: note = n is a, c, g or t
  variation 162: note = n is a, c, g or t
  variation 168: note = n is a, c, g or t
  variation 171: note = n is a, c, g or t
  variation 179: note = n is a, c, g or t
  variation 181: note = n is a, c, g or t
  variation 185: note = n is a, c, g or t
  variation 189: note = n is a, c, g or t
  variation 196: note = n is a, c, g or t
  variation 203: note = n is a, c, g or t
  variation 209: note = n is a, c, g or t
  variation 215: note = n is a, c, g or t
  variation 219: note = n is a, c, g or t
  variation 222: note = n is a, c, g or t
  variation 226: note = n is a, c, g or t
  variation 233: note = n is a, c, g or t
  source 1..149681: mol_type = other DNA
cnaccaacgancntttnancccnttcatctntttntgnccntggnancntntatcntntatcntncntntnanccntntatnaatcntntatnannncntnttacntnttcactaatcatnacntaaccatntacatntaccatntacatntacatntattntaacgntcntaccatcntntacncatntatcatntatcatntacatntaatgncatntantacntacgtgngatccgcggaattcagagaaggaggtgggagaaagcatctgacatgcttcaggcagtgatggccacaagatacattagagatgttcatagaagaggtggcaagtgggtttgagatgaaaagggaatgtgaattcagaggtgtcccccagcctgttcccctgagaagatttcagacccttagcaacccctgggcccccaggtagagctgttgctagggaagatttgtacatgataggggacaggaagagggatcacctacctctgaaggcatcttggttggtagtggccagagtgacatctgttcaggcccattattatccctgacccaggcagggatcatgtccaggagggcagtaggagccagcaggagctcagagccatgccccagttctgctggtgccaggctaggatgttcttcatactctggccagccctgcaggtgacagtgaccctctaacctgagagacaaggaagaggatgaagatggcatccacataacatgctcactgtcatccaagtgggggaacaagcatgcagattcccaaatattaataccaagcttttatttcatccaacttgatgaaattctgatcagaaggagaaacagtctaacaaattcatcatcaaggaaagttcatgtttaatacaaactatctgaggctgaaacctgacttccccttcctcaccaggcagtcaggacagcaggagcaaaaggagaaaagctgggtcccaaagtccacaaggtgactcctggggctgatcctgctcagagaacgtggcaacagtggataagtctgccgagaatgccacaccatcatactctgagctggagggcttcaaccacagacatttattgctaatttattagacatttattgcgaatatattagaaccatggaaggttcaagatcaaagtccagaaggatttgctttctggtgagaaccctgtttgtttccagatgtcctctctggatacatcctcatgtgtgttcagcaatgtgccaggcatgtgtaagagaagcaagtgcatgctttactcagtacacgcttggaggctggtgaggggttcagtaacagctcaatgatatttctttttattaggacacaaatcctattaaatcagaaccccgatgttttcacctcatttcaccctaattacctcttcataacctctatgtctaaatgcagtaatattggaggttggagattcaaaatatgaatttgtgaaacaccattcagttcatagcaggtgcactttgaggatatggccaaggcagtaggaagggcaaggcaaggcttccagtctcagagcacagagggcattttcccaccactcagcacactggcagctcctcccaggtgatccaggtcacacatgagaccccattcctgccttgggggctgcctgctgataatgaaacaacatcacccttaatttcactatttctaagatcaggcttctattttgtgtttattatggggtttgtccaatggccaggtttgtgacataccacccaatggcaggtttgtgacataacatcttatagaattttagatgctggtttccagtgagacttgatggagttttttcatgggttttcatggagttgatcttattacatccatcaataggctgcattctgtagggaatacaaaacgattcctctcctcaataaaccagtcacctagttgaagataaagagttgagaaaagatggtcacaaaacaatcaggtgttaaattctgtgatccatgtgagatgccaacaatgtggttctgggaaagagagagtgaggttgtgaggggccctgcagagcacaatgtccagggctagggtcgggagtagagggcccctggtctggatctgtctactcagcttcattcctcccattgttgaaacagtggctgcaccagccagcaagcatctgagaccacctgattctctggactaacagctgctgaggtttgtgctctgagctataacactgtgagggtctaactgtaaccatttagatcagcactaatgaaaataattttttaatatggtgaaaatgtctgcaaatttctaacagaaaaattgatgaaaagatggtttttcttaggcccccacagcagtctctgcctgggacctgactttgtctttgagccagtggaatctatgctgagattgtaagctgggcagggaaatcacagcagggcaggctgtgctctgggtgctgaggaggacaggaggacactccttcagggttagtgatgctgggagttcgaggggagagactgcatggagctgcctgtgaatcgccctagcaatgccctctggacactgctcatctcacaagtgtactcggatgccagtggatggcccaaacatgggctcaggttggacaaggacaaagatttagggatgaatatatggggctcatttgatactctgaagtttcagcacaagcataacgaattatatggggagagaaagaagtcacaaggttgtgatttttcatttggtattaaaatatatcccctctgctcatttttccctgcagaatgtaactactgatacatatttaagcaaagtcactgtttttaattgttttagtaactgacagcctgtgtgcacagttcctaagtaactgggtagccagaccatcattcctatggtaaagccaggaagtgactgtggatgtgaacaaatgtgagtttaatgtacatgtctccaaagccacgggccactgatctagggagaacctgcagtcagtttgctttcccatgcccagatgagaggacaccttgatctgtgttcttctgatgaactctaaaaactctaaaaactgatgaactctaaaaactaatattctgaaggtctagttcatacttcttttctttgctagagggactctctcactcacatgtattgtactctctgcatagaacagtatgtgatacatacaacttgttttctgctaaatacccatcaatcatgtcattcatgagtcttccatagatgttacctgccctatgaatctgggctcttccaaaagaatgggccagaggtggagctgtgctttcacattctcttgtgcttccctcgtggacaacctttgctagttgtcacccttcccacccagcaaaagtaactgtctttctgacatctacacaatcatttaggttttcctgtcttaaacttcatataaatagcattatgtgtatttttatctttttagtcttggtattattccttactacttttgaggccttcatttcttccagtggactcaaggtcctgtctgatgtcatttcctgtgattctgaaggattttctctcaaatgttttataagacatagctgctatgaatgaatgtattttgtttaccaaaatttttttttttgcctttttgttagatttgaaggatattttcactggatagatttcctggctgccttcttttttttccttttcagcatttaaatatgtcattttactgcttctagcctctattggtcccgatgaaaacttagccaatggctacgttgttgtgtctctgtatatagtgtctgcttttattctgatgcaatgaagattttttctttgtctttcaacattttaatatagtgtgttcacttattaatttctattgactatctaaaagggttttattgaattatttcatctaagaatattttttattacttttgaaaagtttttgtcattgtatctccaaatattttttcagccactttctctgtctctccttctttgtgactctcattatacatttgttggtatccttcactctgagctataaatctctgacatttcttcctttttttctaaacattttctttaggctcaaacatttccattcctctattttcaagttaactgattgttctgtcatctcaatttgctattagacctagctaataaatatttaaattgtattatggtacttttcatttctagagttcccatttggtcattttttatactttccatttcttttcttgaggtcctacttgctgaatcttctttttaaaaatattttcgtttttatgtcaatgatcatagttttaaaaataattatttgaacatctgcatattaactgctttgtagtctttgctaaagccaataatgaggacaagttagaatcagctttcattggctattttctgttgtcattattgtagttgctttactttgttccttcaatataaatcatactcctctgtttttttttcaggattttttaaaactgaaagctgcacacttttgataatatattatagtacctctctttagattgtggggtttttattttaattttaatttttttagaaacagggtctcactctgtcacccaggctggagtgtggtggtgtgatcatagctcgctgcagcgtcaacctcttgggctccagtgatcctccagcttcatcctcctgagtagctgggactataggtgcatgccaccactctctgctatttaaaaaaaaaaatttgtagagataagggtgtcactattttggccagcctggtcttgaactcctggcttcatgtaatccttctgcatcaggctctaaagtagtgggattacaggcttgagctaccatgtcaggcctggaactggtttcatttttctgagcattttaaaatttttttcttagttacttgtcagaacttacttctggtacctgacttatgatagttggagttatcattttttgactttcagatggtgtgaaagtgatatgcattcaagtagaaatagtacttctagtatttatacaactattctatcttctctttcaatagagtattcaataaattgcatgagatattcaacactttgttgtaagataaggtttgtgttagataatgttgccctactgtaaactaatgtaagtgtactgagcacatttaggatagaataggctgagctagtggattacatatattaaatgtattttcaatgcatgatattgaaaaatctatatctcatatggtgtttgaccactgatatctctgctttttattcttaatatttagtttgaatttatagaaactgcacatgtatctgcacagcttagtggtcaccaatgatttgagaagaagttttgctcaaatatctggaggttataaatctatcttctgtcaatccatctgtgtgtagtttaaaaagctcctgcaaaatgcagctagttcttacctccctctggttttactttgcaccgggcacttctgggtctcatcactcatatctatagcttctaagtcaccaggaatgtgtgtagagattgtttcagcaatatggctctatcttacccaggaatctgctatttactgttagcaggtgtactacttgccccaaacagggcatcatctttgactaacaaagctgtgggctttttctgttcattccctatggagttctgcatgtttagctggaaacactgaagaattttacttcattccttggctttactcaagttcacccgctttggcagcaagctgctagctttatttgctatcctcatattggtaaaactccagttctgtatttcatgctgactgagctgggggtagaagggtgctgtcacaggcaaaaggctacagactttttctgtccttactcaaagcactagtacttttttttctataaagaatatacatctttaattattttatgcttcaccaattttcagagtgctgaaatagttttgatattttagctttatatgtgtgtttgttatttatttttgcacagaagatttattaaactctttgtgatgccataaacagagatgccttctaaaatgcatttaaatgaacataatagccatgctgaaatggaatgaggttatttactaacataagtaattttggacttgagaacttgaactcttcaccctcagtttaaagagaaaccaaggacttaaaaaatagagaatcctggtccctggatttcacattcatgaagaaatgcacagtcaatttttaagatgccttctttgtattctagaactgagcaaattagtgattacactctacataatgggagctatgattgtctttaatagagataagaattagaaataggaaaaggtagctgggtgcggtggctcatgcctataatcccagcactttgggaggctgagacgggtggatcacgaggtcaggagatcgagaccatcctggctaacatggtgaaaccccgtctctactaaaaaaatacaaaaaaattagtcaggcgtggtggcgggtgcctgtagtcccagccacttgggaggctgaggcaggagaatggcgtgaacctgggaggcagaggttgcagtgagccgagatcatcataccactgcactccagcctgggtgatagagcaagattccatctgaaaaaaaaaaaaaaaagaaagaaagaaataggaaagtgcaaaataggaggaaacttgtggaattgtttaaaaactacctttttcttattttttagttacttgtgtgtgtgttttaagtttatgtggaaatacttttagacctaaaatttgaaaaatatggtaaaaatgattcccatatgcgcctctttcagcttgctctaatgtcagcatcataaataaccacagtataagtatcacaaccatgaaatgaacatagatataatgttatttgttaactcatttaaaataccatatggatttcactgatttttcctgttgatgactttttttatgttacaagataaaattcaggtttctgtattttatttggttatcctgtcctcaatatctttaaatctgtgatagtttttcacttttgtttctctttcatggccttcaaacatttgaagtttactgtccaggtatgttgaagaatgtcctcctagttgggtttgtatatggtgtttactactgattcaattcacaccattaatttttggcaagaataatacagacaggatgtatcctcagtgcttcacatcagatgttacataatgtcaacatgtcttataggtggtaataaacgaatatgatcaatgaaatcccatttggaaggaagttttggacaaaaataatgaaaacaactgcttctatcactctttctactaggtcattgcagacgtcattaggaataatctatttcttccttatcgaatatgtactttattttaacaaactttaatctttttacagtctactgcatcacagagaaaattgaagaaataatttagttaacttttaaatggcaaatgtttccataataaccatttgccactgaaatgttgatagcctgaagaaagaaaaagaatgggatttattcagccatggtagtatcttcacatgaacagcttttaccgagtcaactatttggataaataaatagaattttctactacttagaatgttgcaaaattcaaatggagcagtgtagcatgcactgagctacctctactgggaaagttaagaaccactgaggctatataaggattcatacagtgagtcactatttctggaaacctgggattctggtgcctcagttgaacagagtccaagaatcaaagtccaaattgttcaatgatttttttttagaactgcaaaatgtccaaatagagcagagacgctaaaactgagtggccaccacattagctgtctgtaaaggaagcagctggtaaaatctagtaaacactgatggtcttgttgaggtttttgtttcatgttgaatcactgtgggaggtaagttataatcctgctgacagtaataaactgcaaaatcttcaggctgcaggctgctgatggtgagagtgaagtctgtcccagacccactgccactgaacctggctgggatgctagtggccctggtggatgcaccatagatgaggagcctgggcgcctggccaggtttctgctgataccaggttaagtagctgctgctaacactctgactggccctgcaggagagggtgactctttcccctggagacaaagacagggtgggtggagactgtgtcattacaatttctctggtggtatccaagattggaaataaaacagaaatgcactcatgtaatctagatcaaaccagctgtctttgagtagagccaaaattgttgatctacattgaattttaattatatttcttgctgagcagaggtggcaggagttttcactgatgtgcaaaaccacctcatgttcccctcacctgggagccagagtagcaggaggaagagaagctgagctggggcttccatggttccgtctgggtcctaactgagcagttccttcccagggctctgacccaggcattgatatgggctctggaaggtagggcagctgggagggacatgcaaagcagctgggtgggagctgagcttccagctgcagagaccacctgcttcttcctctctgcactgagcgtcctgtgcctccctggttgtcaggccagaaaagtctgttggctcagtctgagtgtagaactcctcccttgtgctcacataatttcactcctgtgcctttcttctcttcaatcacctaaatacacccgtatgatatttggcacaagtctgttaagaacaatataaaaggctgtgttttcatttctctcttcctgtcctcagtatgcccagtcatctccctaagtgcattattggatctatggaaatgaagagtctgttagaacttaatcttccagatagacattttttttttttttttctgagacggagtctcgctctgtcttccaggctagagggcagtggtgcgatctccactcactgcaagctctgcctcccgggttcatgccattctcctgcctcagcctcccaagtgcctgggattacaagcgcctgccaccacgcccagctaattttttgtatttttagtagagacggggtttcaccatgttagccaggatggtctcgatctcctgacctggtgatccacccgccttggcctcccaaagtgctgggattacaggcatgagccaccgcgcccggcccagatacacctttcatttgcttattagtaatgttttctgagggtcctgaagctttccattaacccagacacataccctctttgagttaaaaacttctgtttacagtcacatgtcctggcagccctgacatagatgctccatggcttgccgattgcttgaaattaatcaagtaacttaacttccctgtgtctcggtttccatatctgtgtaactgtgacaatagtggtacctgccttacagtgctgtagacagtttaaagaaaataagataaaacatttacaatagtattcaggacattatgtatgtggcaattaattttgttttcattgtttaaatattcagcactacagtcatcatcattataaatatacttagcatggaaaatagtcttaaatctaatccaagaatgttttatccacagtcaaattaaattctaaggcattttcttcagtaactgtacacaactcttaaaatcctaatgatttgatcttaatctgtgctaaagtactcagaccttccatcattcccatccatccctgtctaacgcattacttctcatcatccattatttaaatgttaccctataaacggtccccatgtcctgttgctgtccttctttcttatgtaatctttattctaccttgttatcttttatgttattcttgccccaggactgacaataaggaaaagctaccatcatttcttgtagacttgctccagtataattttttcaggcttgttgtcttggaaatgaggattgtgtcttgcaaagaaacatattcattgggtcaatgtgttatgaaataaaagattttatctacttatgatccaataattaatttagactgacttgaacagatttttaatgacaaaaaggagaagacgatataagagaaaaatttaatacaatagaaaacacaagctaatataacgcttgcttcatggatttttacatgtatattagacatatgctgggtatatgtgcgcaacgacaatctaaaaactgaatgataactagcttaaggaatgcctgcattacactgagtcttgcccacttttccagttatgaaaagaaagctacagcactatttgtatgagtatcaaaccttctagatgctgtgatagaggtagagaagatttactgagaccaaagccttggaagtagtagatgcttgttctatgatattatgtggctgtggttgccgttgttaggaaatacagtgggagtgaaagcaaggagaagatttacaagctctgctcttcctcatactcacaaccccctctagagatggacagatgttggtccaggaatctctgacacctcttagaagccttttgctctttccagaatgtttcctgacaagtattgttttgagtcacagattaggtgaaactaggtgtagaagaaaggactagagcaagggaagaagttttccatcccagacagttgttgtaggaacagggaaattgaatttttcatagatttatgtgacacttgtatcatgttggggagagaggcatcaaaccaggctcattactgaaagaattattacgttatttaagagagaaagaactgtgaatttcttgtcaaatagatgtttaaaattcaaaactactattttttttttggagatagaatctcactctgtcacccaggctggagtgcagtggcacaatcttggctcgctgcaacctccctctctccatttaaagcaattctcctgcctcagactcccaagtagctgggattacaggtgtgtgccaacatacccagctaattttcatatttttagtagagacgggattttgccatgttggcccggctggtctcaaactcctgacctcaggtgatctgcctgcctcggcctcccaaagtgctggaattgtaggattgagccactgtgcctggccctactgatgtattaatattattcatcttcttgaatacaccaagtggtaaagtgcaaatccacactttaaacttgagatttctcctcctatgtgaattatactagtgaggaacaaaaaaattctctgttggtggggagatgatgtttgacagcggtcagtttgtgaagcagaggcttatgtcacaggactttttacagtattacatataaacatggtgaatggcctcaaacacagaagaatcagcttttttcatgagccatactaccaccaagaaagaactgaattgaaacctgtgactacttgatgaagggtgtataaagaagagggaaagatttgggaggccaaggcgggtggaccacgaggtcaggagatcaaaaccatcctggctaacatggtgaaaccccatctctattaaaaatacaaaaaaattagctgggcgtggtggagtcccagctactcgggaggctgaggcaggagaatggcatgaactggggagtcggaggttgcagtgagccaagattgcaccactgcactccagcctgggtgacagaacaagaatctgtctcaaaaaaaaagaagagggaaagaaaaatgacacaaaacacaatgtcataaatggaaaggaagaagtcattacacagcctacaggagtaaaaaaataaagagaggatattatgagtaattttatgtcaactaacttgacaaaagtggtgcagggcaggttcttggctacactcaggaaggaatgcagcgtaagctggtggtagaagaaaacagctttactgaggtggcagtgttacagctttgtgtctgttcttgtgaaacagagctaccacataggcattgtgccaagagcagtagcgtaggggcagttttgcagtcatatttatccccacttttaatgacatgctaataaaggagtgggttattcaggaatagctagaaaatgggcagtaactttcaggttttgccatggcaatggtaaactgatatggcactggtgggcatgtgttatggacaggtgcttccagtgtctcttccttgtgtcagccagtcttcaatctggtcctgggttgagtcccacctacctcctatctcattgctccctcagagattagatactcctccttaatcttaaggggactgcagaagagcagagtcccttttctgtaagtgcttcctgctgactttatgggggcaggccttccctagcctttgaggagtaaaaatctttggtacctgaactaaggggcccaatggcacgatgcattcatttgtggggtcagaagacagaatgggttggaagacttatgacagaccgtatcatctttacatgaaatttagaagacataaactttactaggatgttaaacaagaaaattataattggaagagagggaaaaattaatgctcctaggtccacctacggaaccatgttattaatccatgtgtttgcaaaacaacaaccttaagttttctgttttataaatggaggttgtggtgtcccccttttgtggctgtaggaccttgtaagaaacaggtttaatcctgggcagctgtacccaactagtggcttcctgaagcctaacagtaattaagagtaataaagaatatctgataatggctccttattctggttattattgattcttgggggatcattttgttgttgttgttgttgttgttgttgttttttgagatggagtctcgctctgttgcccaggctagagtgcagtggcacaatcttggctgggctcactggaacctctgcctccagttttcaagctattttcatgcctcagcctcctgagtggctgggattacaggcatgtaccaccatgcccagctaattttgtaatattagtaaagatatggttttgctatgttggcaaggctgatttcgaactcctggcctaagtgatccgcccatctcagcctcccaaagtgttgagatgaaaacgtcacaggagctgatgaaaaaggaaaaggagacagcaatgatcccaggcctttttaaagggagaacaagctgaaagcagcaaaatacaacagttaaatctctaagacactaatctcagaagttttaaaagaaactcattatcgtatcacaggcaaaattttttgttttacttgttttttttttttttttttttttttcttttttttgagatagagtctcgctttgtcacccaggctggagtgcaatagcgtgatcttggttcactgcaacctccacctcccaggtttcagccattctcctgcctcagcctcctgagttgctagggttacaggtacatgccactgtgcctggctaatttttgtatttttagtagagacaaggttttactatgtttgccaggctggtcttgaactcctgacctcaaatgatcctcccaccttgggattacaggcatgtaatcccaaagtgctgggattacaggcatgggccaccatgctcagccttaaagctgtatttttattaagtaaagtgtagaagaaaaagtgtaaataaagtgacagaaggaaaacacaaggctgttatggaaaatgataaccttagggcagaaaacaagaaaaggcaaaccaagatttccatagggtgaggctccaatccacaatcctcggatgaatgtcaatgctaaaaaccctggagcctccagggagtggccaacagtactaaatgctgaaaacccagagtacacgagtatcagcctatgaatgtcccacaccaaatgccaggaaaccctggagtatccaggggctgaccagtgcagaaaatcctggagcctcagtggggtggccaacaatgagccccaaaggcctggttggggccatagaacaatgtgactctggcttcttagagtcaacagaacaggagaattcttacatccaagtgtcctgccttaaacaattgcacaaacataattagtagggacccaaagaaaaaactgcaaagcaaacacatatatcaggacagaaaataagataaaatggctgatggataaataaaatgtcattagaggagaaatgactaagagaaagatcaatgaggatgtagtcaggtgtgctatgggggacttcaaatggactatttagccaaaggccttatttcctggaccatctgacatagggcaggtgggtagatgggacacttacaggtgtgcaggagccaaaatggtgccaagcagtctctaacatgaggcctgcgtgaagatctctccaggctccccagcttgggtgggttgaactcccacgggtgaactggtgcatggagcggctggcctgcatgaagcagtggctctgtggccacttacctaactgctcagctccaccgcctgtcaggaaagatgatggctcttaaaacagcctttggccagtgttaacagctctgcaatgttagcaactatgtagctttaatcgctgtagcgccgatctcgccctctctcactgatcgctgacttgccacttctccaatagctgtctcgcccattgctgatcgctatgtccatcttctcacaaaatgccatctcttgctgtctcttgctgtcttgcttctccactgtttctgctgtctcaccaccacatcaaacactgcctctcaccatgtcccatttatcctccctccttattaaacatccatctgcatgtccaggcctggcatccccaggctgatgtctctgtcctgggccaggtactggagagtattgttcctccaacttcaccaataagccatggttctctcaaatcaaattatctcactgcaccaattttgccaaggtttgcagtgtactggtcaccaacttacccaaatctactgggacacaattcccatgcacaacgagtaacatgaagtggattactacctacagagagtcagtcagagagagcacaaagctgccggggcctgattgacactagactgtgcctaccccacaaggactgcagctgagggaccctggaatgcagcctaccctgggttttatgtcttagaatcacatgacacactgggctggagtgttgaaggaattcctgtttctagtagggacagaaacagaacccaggctgttctggccaatcatgccctatctcagaatgttacagttccagaacattctacagttattcctgaaaactacaatcaagaaaaggaaggagactgggttgattcatgactaaatggaaactgttctgcaaataccacagtgaaatcaaaactcagtatttttgagactgggttatttcacttagtgtaatgtcctctagttccatccatgttgtagcatgtgtcagaatttccctttttaaaactaaataatatggaatagtatgtatataccacatttggattaccagttccctcctttgtgaacatttgagttgcttctacatttagctactgtgaataatttgcttctgtatgtggatatacaaatatctcctcaatttaatgtcttccattacttgggtatatgtccaaaagtggaattgctgaattatatagtatttctatttttaatcctttgaggaattgccatcttgtttcccacagcaggtgggccatttacatcaccacgacagtgtccacaggagttccagttccctaaattctcaccaagactggtcatcctctgttggaaaaaaacattctaacaggcatcaggtgggttttgtttttatttttctaaggattaataatattgagcatcgtttcctatgctagttatctaaatatctctaaagtatcttctttagggaaatgtctattcatatacttttctcatttttaaccagttattttatttttactgttcacatgtagaacttatttttgtatagtagatattattaaccccttatcagatatgattttcaaatattttcttctattccacatgttgcattttcactgtgtaggttttatctcttgatgcccattttaaatttttatgtagtccaatttaattttttcttcttttgcctgtattttggtgttaaaggtgttagtatttaaatgtctgtaaatattcacttactacgctgagaatgtcacacttcaccttctctctctgatggtggagctaagagtgttacactctcccattttgtcctaggggacagtgaagctaggtgagaacccagtggcttttctgagcttatttgtcttgcatttttggtgacatggattgttgttcacatcagcttcctctggcaagtccacctggaaagcattatatttagcaagaaaaaaggaggctctgaatgatgtcactgtaagctgtttatattccctgttacaaatgtcaaatccgtgaagcataaagggatttactagaggatattaaattccttagaaattgttgaaaagccttaagcaacaggctccaggcaaagcctctggaacaattccaagaatggcactgctggcgcaggttggggaggagctcctgctgcctgagactccacattcaagctgtctcctgcaggaaagagagcagctcttctcactactgccccccgaaggacagctgctccgctatcaactactagagacctgacccctttctctgcagacctgcctgtgttgattacatcttcatttcagtctcatgtagattcatctgttttcatggattcaggggctatttctgcccaagtccaccctgtggctttctatcataaatacacatctttctacactcgaatttctagtcattactagtatcaacagcaacatgctagaacctcacataaagatttcctttacaaagaacatcatgctccccacgtagcattgtgctccccagaatgtggggaaagtccaatctgttcagcccaacaccatgtaggaaaaaaggctcttctctcatgagccgttaatctgtctacttattattaatttgtgggctaaactataaagactggtaaaaatagcacttcgaattcttttaacaaaagggtgtaaagaaaagattaaattatttaacatgcatatatgcatgactcatttcgttattgtcaccagcttctttcatatttattttattctctagtttctggcaatactttctctatggtagagtctggaaaggctactcctcatgtccttggcttcctaagtcccagatgtggtgaagaatgcccatcagctgtgttactacggagtgcttttggattgagatgagggaggggaaatggctgaactcactcaaatgtgatcattttcttggtctaggtcacagccaggcaacacagtcctctgggcacaatatcatcacttgccatgtttctatcaaaatgaaagtatctttcttgactgtggaaaacataggggtgggggcggggagggtcaagtaatagcaaaaggagtacttggagttgcctgagctgccactctggtttccccaaatgttttcaatccatttcattcatgataataaacacctttctgcctaaccagtcataatgacttttctcagatccaactgattcagtgataaacctatagagaaaaaataactacacttctccatgtttaagctgaccaggatgctgtccctggtgtttacacctccatatcccactatgcgtttcatcttctctttgcctcactggtgatccaagtacagggaatgcttcacatgactgtgatccctagaacttcgtcctgatgacggttgaaatcttctctgagttttaccagtggaaatggcaataaatagaaacattccagaaggtcccctaggttccatattttctgtacttcctctctaaaatatgtaaaatcaattatgtttgctcttgcttttatggactctatctatggccccagcacacacgctaatgccctgtcttgacaatttatccagtattttaataaatgtaaatggtcacatgcttatcatatcatttcttccaatttcatggaataatttcacatcaactctttggattaagagccgtcaaccaaaaaaccacagccctgaataaatagaaatagagtatttcaagctgttcatttggcataacaatgatgagtctacagctcattttcaagatataaatattctgtttatgggagtgacagcaccattcatacagttactgtttcagagcctccaccatatctgacaggacagcaattcaatagcacaagggtttgtgtgccagctttgcttgactaataatgggtttttctctgtctatagggaaagcacatgacaagagcatgagctacacttcacttcactttttttgaggttaataagttgcttgatccaaagctatattacagaagaacttcctgactctgatgaaagctcttggaaaatcctcaaataatattttatgcagaaatataaccaaaaaggaaggcaaattcatatataggaaaataaccagtgccctcctcacgttacatgaggtctactagtatcacccgacaccagctgttagtctgagccctgatgtgtggcgcaatgttaggggttcaagagacgtcattcttcttgacaaattaggtgttcagaagagccagtagccctgtatgtctcagttagttgaaactcatattattgagtccccacagggacctccataaccttggttcaggagacaccttggaaacctgggaaaggtgattgactgaagtccatctgttgaatcatcctcattattaaaagcctcctactcattaacggcatttcgattaatattcgcttggaaagcatgtttttattttggctcatttttgaaacgtctagtcatagttcttcctgaaccactttgtctgcaatcatcctgttgcatttcttttaagggctgatgatctgtcaaaagcaacagccaatattattacattgctgttctctttgcaatgttatcatcagatgtaacccttgcagattaaccactgttacgatttttacatttccagggatttcttgacaatggcaatgatgtgacgccatccagcatctatttgtgagaactctatttgacaaatcatcactgtgggtgtgaacataatggagactttcataggatgcaatggttaatattcaacattagtcaaaatttactctagtcctacccttggagctctactgggttggaaaaatattttagataaggacaatcatttcatagagttttaaaaataaaggctaaaataaattttctgtagcaagagtatgaactatatgtagccagcatacccttttttagtggcatataacaaaaattatttaaatgtatttaatttaaataattgtataaatatgcatatataataaacatacttaaatataaatactatacatgtatatttgtagccaacattttatcagataaatatatgtaacttttatgtatcttatatacatatatgcacattttccataaataaggtaaattttaattttttattgaatactagttttaattttgtctttaattttctcttaataacttcataatttaatactaaatgttcacatttataccaccaacttaagaaaaaatcgtgtgtgtaggtagaggtgtaaatactgtatcaggaagcttttatgcattactgattggtaactggttaaatccacaactcagtggctgataacagtaaacatttgttttcgtgttcatggatgctcatgttcacaatcatctggctgatcaagaaagggctcagctgagtggtttctctgcagggcactgagctcatcttcagcctacagatatgaattgtctgaggacgaggctgaacagcagtgactacacatgacacaatattcttatggcaggtcacaggagtgaacaacatcccaaaacaaactgcacagttgaatttaagtccaataacttctaacatagcttcacatattttaaatatattcctttatttcaatgagtacaaattttgaagaaaatgtttactccatttaattatagaggtatttgatcattccatggacaaataattatgctttcaacttttacaattctgaaaatacttgcaaatgtaaatttgcattaataagaaaataaagctggatgtgttttcaacatgtagctttaagtatatatatattttaatggcctcagtgggggaaaatcattttaacttatgtaaatatccctttttgcctctcttgtgtcctataaagttgcccaacaagaggtcctcccataagatttggaaatcagaaaaggatgactcaatattctccattggtacctaaggcagacacaggaacagaggtgagggctggagaaacacctggaaggatgctgcaggaagctgagaacatcaacactcccacccctaagcttccagacaggactgaggaccacatggttagatagcccatacttcaagggcagatgcattctgttttctgagtgagcgccattcaatcctgcttctaatatcaactttcctgactactatatccttggctttgaaaggttgtagtctgaacgttaatcataggcatcggttcattcttgttatacccaaaagagccaagacacccagtggggaaaggcactcagggtgtaaaatattgtttctagaatgcaattgaaataggccctgttatcccatggaactaaggtttatggttttttgaataaacagaaattgactcccccagtcttaaaactcaagatagttacatttgtcttatctgagttcttttttcagtaaaccaaccatcaggcctcgtagatactatcaaggagctgaaacatacatatcactgaatccggacactgagacatcagaaccttcacccattatgattgcataactgacctcttgcttcctgttgaccaaattatcttccttacccctcccaaattcctgttttcccacattttgtccctgttatataaagtcttaattttagttggtcagggagatacattcgcaaatggtgtcccatctcctcggctgcagtacctgattaaagcctgtttcttggcaatacttgttttagagattggctttctgcgtggtgagcagcagggtgtacaatgaatccttggcattttagtaagaaaattctctgcaaccttcactgctttggcttcttgtaacctgaattcacatttaactgcaacttctgagacaacttgatataattgatataattagtgaatcctaattcactttgtccaccactgcttaccagtctgagcttgccagctcccaacccttactagtgccagtgaactttctgaaaatgcaaaaggtaatattttccctttttcataaaacactaaccttctcttcgtacttccaatatattgaagaccactgagttttcctgtgtgtccaatttggcaaacatttctttgcaaataaaacatgaaatttagagattccgctctacattttatttagacttcagtagtttagactctaattttctgtattaagacaattcctgcttagaatatctatagtggtttcttctctgttatttgaattccaaccaaagccctaaactagactccttaggtgtcaagatctctgcctttattaaatcaggagaggcattgttatgtctgtgcagctggggcttacaaagaaaaaggaattgggttgcagaggtgatttcaggtccccctctaccaacaccatcagagtgtggttgcatctgaggaacactctcaggcgatggaggcatcaggaggagcagctggggcagcccagcctcacacatttgcttccctgggggtttttgtttgggtgtgtaacactgtgggagggtaactataatactgttgacagtaataagttgcaaaatcttcagactgcaggcagctgatggtgagagtgaaatctgtcccagatccactgccgctgaaccttgatgggaccccactttgcaaagtggatgcagcatagatcaggagcttaggggctttccctggtttttgctgataccaggctaaataactgctaataccctgactcgcccgacaagtgatggtgactctgtctcctgtagatgcagagaatgaggatggagactgggtcatccggatggcacatctggcacctgagattggaaacataaaaacaaatgtccatacaattaatcatgttgtaagagaacttccctgaagggccaggctgtaccaagcacactgggctgagtaaattcctagtgttctccttccttacctgggagccagagcagcaggagccccaggagctgagcggggaccctcatgtctatgctgtgtcctgacagggtctgactcctgcatgaagtgtgtccagcctattaataagtcttcagggcaggaggttgagcaggggatggggctgactgggcacagctgcagggctggctcatctcagtaactcagcaccagctcagtatccccaggtgtcccaggaaagaccagggtagcacaaatttgtctgtggtgaatgtgtttctactggagagtagtttgttatgagaaacattttttatgtatttttttgaaaatttgaaatattcctcaggagtcgacggagtaatgtatttcattggcacatggggattatttggaatatcttgtttgtaggaaatacatagtaaaatgttaaacagtatgattctcaggacttcaaaagactctcatatgattcgggttagggaaggaggtactttgtcctatacttcaacatttctgtgagttttaacattgttcctttctaaaaatattaaaaataaaatttattgacatgatgctatacatatttgtaagtattaggtaatggtgttatgccattgttcttaccactataagatcaagcaatttactacagatacagagagatgataccgagtttcctcaatgcatgcagcactcacacatccaccattatcaagagctacaggtctctttaatacccagagactaaattcacttcaccttattcttgttttgggcaccttcattgtctaccttcttttctgtcattgagtattactttccaaagttcttctctcttattgagggtgaccactgcatggagcatgtccctgtcatgcaccaacaatgccactttcttcttttacgttttatcagggacatcatcctgacccagacaccatcctccctgttaacatctttaggaaagagacaatcccttatcaagcaattgccaacttacatggagaaatcagctggatccagatgaaactggacatggatttgcagtcattatatctcacatctctactgtgccaaaaatgtcccagcctggcttagtagcaggggacgtggatccaactacatcagcatcagtgggctgcagcctaggactccacaaaattttactgatgcctgactaggggagacaaatcacagtgctgtagcccatgcacaaaccttcctgctgctttgtaagccacctgaattttaagggaacttgcttatattgggagaagggaagaaagctccatttgtcctctaaatgtttgctgaaaatgaactgacaaaagaaagactaataagagaaaaggcaagcaaaattcacttaaagtgcagtgggatatcatagcggtgtgattactcagataactcaatgagatccagttgttcatacttcctttctagcgaagaggtaattgggaagtgtaggcaacctggagagaatagatgaggatagaagtgcatcctcaaaagaacaggtaatagcctgtctggataaagcatcaacttctaatctcttctatttttgattcctattttgtgttaatcttccctgatataaaatttcccaggaagaattttcttgacaatcagtttccttctggagaagctgcttttaagcagataaaggagtgagataaaggagtggagtgagcataccccaacagctaaaactcacaagttagaggatttataagtcagactctaagtctcagattttgtaccgccctcttgcttcataaaaatgctttgttattttttaaattttactttaaagaaggacaattttggagaatatattaatttttggtggaatgaataatgtccccaccccaaaagatatccaggtccttgtctctggaacccaagttttataggagttattaagaaattattttaggcagatagagaggaaaaggcatccttggtaagattttgtttcttttaaagcaactccagacatgtttcttgtctaataggaaagctccggctcttagagccaggctggcaagatttgatatgcaaatgaaggccattagaaactgggtccaccctaacatggctattcctaccttcttcttccttgcccctacatgtgcctggcaacatggctgcccccacatatccccatgtgtgtagaacattatgatgccctacatgtgcatattgaaaggctagggtgggagggccagtttttgctcaggctatgtgaataacatgcctggtcaaaccaatcccttgagccctttgcaaatcagacaccacctccttcattctcctcatataagcagccacttttccaccacagatggagttttctctttgttggaatcccctgtccctctgtctttgtacagggtagctgtttagctgttttattcttccttccttcttacatattaaacttttctctccttaaaaccactccacatctttctgtggcattttatccaaagcagtgtgaaacagcaagaaccctggtgttcctccagtcattggagccatatcataaggattctaccttatgatagatagcaaaaaatgaccttgatagatgtaagttaaggactttgagaataagcttcctggttatccagatgaaatcaatacaatcacaaaggtccttaaaatagaggaggaggattgcagtcagagaggagctgggacaatggggacggatgttgtttgaggaaggaaggggccatggaaccagaaatatgggagcacattgaagataagaagcagagaatccagttctctcctctggagcctccagaaggattacagccccactgacaccttagcattagctcagtgagacttctgacctccagaactacagggtaatacatttatgttgtgtgaagccaataagactgtggcaatttaaacagcagcgttggaaactaatgcaaggggaagagatgtctttcagctcactgagagcatgcttgtcctctgttcttggaaatatttccaccttgttatctggtgtcagacaagagacagagaaaattttttctgagagaagagctcgtacaaaaattctttttagctagaaattctctttggaaaatcccatgattatctcttatacgatctgggtatcacagagtttaggggtcagaactcacagcacatgataggaggaagagggttttgttagtttgttttcatattaggagggaaaattagattttcaggacacaatctgagagggacagactgggacagggatattgtaagagaaagaggagatgtggaaggtgtcagagcaatgaaacatgtgtccctgcttccaaatctaaaataaagtcattgattttagaaggtgaagcaaagctcttcaccttccatcttcttatgaaggatcaaattctacccagagttcctgtccctcctttactcccctgacattgtattgtggagctaatcacatgtgccttaatccctgctcctgtcccgggctgggagaggctcactgtcctcaccatgcccagcaggctagagctcatgccctagacaccaaaggagaagaggatggtttctgtacaggaggtaagagctttaccacatgttacatttcactataattctaagtaaagttgtgtggagagaagagaacatatgggcaactctgtctggtagagttggaagagggcagtttctgagagtgacaatgaattcacatttctaaattttcagatggcaaatgctagctttagcaattgtggaaatgtggactttgagtttaagaacaagacagactttcagatactgcaataaatgaggagacatttggaatagggtccttagcccagggctaaggtcaggctggcagtgcctgagagatgccaggcactggccctgggctgtggaggaagcagctgctctcctgagccacagggctgagaatctgggaggaaccacaggccctggccacagggctgcctggcagggcttcagggaaggaaactgctcacaaattcaggggagctgcattaagcatatatcccccagcctggcaagagtaaaagtctcagagacccagaccttagggctggtgctgggatcctgggctggctgctgtcagctctgccctccctggtgctgaatgactgggaccctgctggagccaaaaacggacagtcagcaaatgtccttaaagtctttactcagccagactctattctgcttggtcagaaaagaaacacacgctacacaaataagcataaaattatatgtatctgtaatatgaatttctattgtgaactttacatattgaatacatatttaagaaataagttgtatttatatatttgtatatactatgtatttatgaataaatatgtgatgcatgtttatatataaagagatataactttggttgctagtataaggtatagttttaaacttaaataaatttaacatgaacattgaaaatgagcactgggtgcaccacctcatggccctcctcactccaggacctgagggtcataaagctcagtaccctcttccatgttccccctgggctgagagaagtgaactgcccgttgctgaggatcatgagtgacctgaggggggtctacggaatcacagaacagcagatgcccaggaaatggatagtgggtctgggccctgaatggagggacgttttgtttccagagctcagcatagacaagtcctcctctggtcatttctgtcaaacaaagcagcatatatggctcagaggctgcattgtcacaggatgaagcccctccatggctcattccagcttcccctctgactggggtgatgtgggatctctgcccagctttcatggctcaccagctgctgggactctgttgacaatggcctatgtctgccccatgcacaagcttctcaatagttgccattttactttctggtctccaataaccacaacttgccaaccatgacccttccacaaagattcatagagtggggtcagaactatgggttcagcaacgtgccggggcatgcaggtaagagacacaaggcgtggccagcccgtgtctgaagtgaggatgaatttgcatcatgaattcagagtaggagatgggagaaaacatcctgacatgctccaggcagtgatgcccacaagatacactagaggtgcccatagaggaggtgggaaggggatttcaggcagaggggatgcgaatttagagatgtcccccagcctgttcccctgagaagatttcagacacttagtagcccctgggcactttgagagaccgaggagaaaggaccatgtaaggccaagaatttgatgccagcctgggcaacacagggagaccccatgtctacaaaacacacacacacacacacacacacacacacaatttgttaaaatgtgtgaaaaatagcatcacaaagtgattatgtatgaacatttgctcagaaaattagaaaacaaagcaatgtcttctgagctaacaatactataataaagatgtcaattttttagctatagtaatacagagaacatgatattgtctatcttaaccatttctaagagtgtagtgcaatgccattaaatatattcacattgctctgctattattactgatactaaatccagaaccattttcatctgaataaaattaatatctatatcctttaaacaatactcccccccatttcctctatccctaccgccagcaacctccattccagttctgtctctatgtcattgacatatttgaagcaggttcactctgcactggttaccaacatacttgagtgtggggaacacaacacccccacacagcaagttacatgaaatgggtttattatttacagataagcagcaagggaacaccacaaaagtcttggacttattatgggtcagtccctcaaggcacaggaaagccatgtggagctgatggagttgactatgtgtaccccacatgcaccacagctcaggaatccaggaaagcagccactcagggttttatatcctgagctaagaagacacacagggctaaagtgctaacggacatcctattctatgggaaactggtatagagcacaggtaggttgttctgctcagttcctctccatctcaggatgttacgattccagcaaattctacaattattcttgagaactcataaaataagcaagaaagtggagagaactaagtcagtccagggtcattggagaactgttttgcaattaccccaccacctagacatcccccttagcaaagctagcatatttcatatgcccaccaacttcccttgaactggaggcagaagtttatcttttcagattgatgaagcaccttgactaacacaacttcaatgcagattatgaagccatagtgagagtacatttcactgggccacgaaaagctagtaccactggtgtagggtccagccctgtggggcttagtgggggttctccccatgtgcagagatgagagattgtaataaagaaagacacaagacaaagagataaagagaaagcagcttggcctgggggaccactaccatcaagacgtggagactggtagtggctctggacggctgggcacactaatatttattacatacaagacaaggggggcagggtaaggagggtggatcttccaagtgattgataaggtgaagcaagtcacgtgatcataggacagggggcccttcccttttaggtagccgaagcagagagagagaagacagcatacgtcagcattttcttctacgcacttataagaaagatcaaagactttaagactttcagtatttcttctaccgctacctactacgaacgtcaaagaggaacccggagtatgggaggaacatgaatgtggacaaagagtgtgaccattgaggcacagcaccacagggaatggtttaggcttccggatgactgtgggcaggcctggataatatccagccttccacaagaagctgggggagcagagtgttccctgactcctccaaggaaaggagactccctttcgcggtctgctaagtaaagggtgtcttcctagacactggcattactgcttgaccaaggagccctcaagtggcctttatgcaggtgtgacagagggctcacctcttgccttctaggtcacttctagcaatgtcccttcagtacctgacactatactcttaggttattcctaggttatattagtaatgcgacaaagagtaatattaaaagctaatgattaataatgtttataatagtgattgataattgtccatgatcatctctatatctaatttgtgttatgactattcttattctaactattttctttattctactgaaacagttttgcctgcagtcttttcctcggcacctacgtaatctttcacacacacactggcaggagggtaagactccccaaagcagtgactaagatgttaagaagtgaaagggggatctttcagatgccctattctctgcagccagtgggcctgctttaggatcacctctacttgtatttctagaatacccgaggtgtttatccaggcacagcaggtagtattgggtgttggtaattgcgtggaaagtctccgttgggttcctcaagaatgtgcccattgtcatgcggattgggcggttgtttcttggtcagagtgaagtctcatggggtatccaaaaacatgacataaattcctttcaaaggtcaccatggtagccccagcatctaactgagtgacatacatttagctgtccaggaagcaagctatggccatagtccttttccctacacaggggatcctttaatagttctgccactcagttgctattttcctgaccagatggctgggttgttggcaatggcccatgatttagtggaaatggagcaaaatatagtgttgggggcagcctgcatggctactatcattgcatgaagtttggcccactgggcagaatgtccatgttcagtgtcagtcaaaagatgccatcccctggctggatggtggcctcacccagtggacccactggcatgtattttgtacaatcatcagggccccatgccatactgacataggcatgtctctgaatcgttggctcattgtggccaaaggaaaaacaaaattgtcccctatgggtcatttgttcccttctaggaagcttgctatttgtttatgggcattcatccatttgcacatggatcctgtgggaactgggttagggcgaattctgactgtaccagttccatttaataatttggatctgttgggcctgtccagttttattgattgtgtttgtaggcaccaaagtgagaatgggtagttaaggtagcagcgtcatccctgatgctctagctatgagataatcagcccctatcagtttcctacagcaagaagttgccattcaaaagaggcacaactggtggcttctgttgccacaggctccagtcagcatatatagaaatagtggacacctggatttccattgagcaagcagcctctgaaggtcttaaagaagtgcctcagtcatgccttgttgaacagattccaagggtgattttgactaacatgaccaaaagaacacccaggtaaggtttctactgtccccagtaccccaaaatacctactagcttctgggtctccatcttattagtggacgccaccaggaccagcaatgattaaatatacctgggatacctcctaggtttctttttcaggtggccttggcattcagccttcaacaatccatcattggtctgccaaactgggttgttccattgtgacaccaggctttgtgacattttaatctttttgtagcaactattaaatttactaggtagtgttccgatcttcactgaatatgcagtcctgctttgtgaacaacactctgggacacgggaagcttaggtggcaggcaggagtggatatgccccactgtcgtgtcttgaatacttagctatgagtgcggatagcccctcaggcagcagtgatgttttgtggcacagcagcaaaatgtcagtacctctattgcactctgcagtgagaaccatggtcaccagcacccaacatagcccaaagggtgtggtccacatgcagatcagcacacaagcacatactcaccatggggtcctcatttgtcttgacaccttctgatgtcttcagtttatttttttccagggaggacctggtaatattgtcaggtggattgcagcatacaaaaatcccagaatagtctgaattcttttttttttttttcaccttttatcttgagaggaatatagggctggtagcctctggtggagaccttggccctgttcctacctgtgccattcagacagacatttgggtctgcaatgtggcttaaccaaacaaacacaccgaccaggctgcataagacttccctcgtgtttttccatgtctcttttatagagagtgagcctccttttctgtgatggccattgttgttcattttggttccttatcagatgcttcagggaccattgagattatctttcttgtgtcatcttgggtgactcagggtccatctgattacccatgtcttgagctctcttgcctcaggaatgagcaatcatgcaactgtctaacaactagaaaattgtgtaccccattcctatttccacattcttttttctatgtctcaattcagtcagccagctgatccatattaatgggaggaggacaaatgtcctgtttatcctccctcctcattaaacatccatctgcatgtccagcccttgcatctccaggctgatatctctgtcctgggccaggtactggagagtattgttcctccaacttcaccataagccatagttctctcaaatcaaaccttctcactgcaccaattttgccaagaaggtttgctgtgcactggttgccaacttacccaaatctagtgagacagaacacccatgcacaaccagttacatgaagtggattactacttacagagagtcagcatgagagagcacaaagctgtcagggcctgattgactctagaccatacatacccaacaaggactgcagctgagggaccctggaatgcagtccaccctgggttttatgtcttagaatcacatgacacactgggctagagtgttgagggaattcctctttgtagtagggacagaaacagagcccaggatattttggccaatcttgttctagctcagaatgctacatttccagaacattctacagttattcctgaaaactactagcaagaaagggaaggagactgggttgattcatgactaaatggaaacttttctgcaaataccaaagtgaaatcataactcggtatttttgagactgggttatttcacttagtgtagtgtcctctagttttatccatgttgtagcgtgtgtcagaatttccctcagtaatgtgcttttgtatgtatataccacatatggattaccaattccttcctttgtgaacatttgagttgcttctaccttttggctactatgaacaattcggttctgaatgtgggtatacaaatacgtcctcaagttaatatcttcaattacttgggtatgtgtccaaaagtgtaattgctgagttatatagtatttctatttttatttctttgaggaattgccatcttgtttcccacagcaggtgggccatttacatcaccaagacagtgtccacaggagttccagttccctaaattctcaccaagactggtcattttctgttggaaaaaaatcctaatatgtgcaaagtggggtttgtttttatttttctaaggattaataacattgagcatcttttcttattctagttatctaattatctctaaagaatcttctttagggaaatgtctattcatgtacttttctcacttttaatcagttattttatttttactgttgacatgtagaaattatttttgtatagtagatattattaaccccttatcagatatgatttaaaaatatttttttctgttccacatgttgcattttcactgtgttgattatgtcttttgatgcccattttaaatttttatgaagtccaatttatcttcttttctacctttgcctgtattttggtgttaaaggtgttagtatttaaatgtctatacatactgacttactatactgagaaggtcacactccaccatctctctgatggtggagctaagagttttacactctcccattttgtaccaggggacagtgcagctatgtgagaacccagtgactttcccgagcttatttgtcttgcatttttggtgacatggattgttgttcacattggcttcctctggcaggtccacctgaaaagcattatatttagcaagaaaaacaggaggcagtgaatgatgtcactgtggattgtgtatattccctgttgcaaatgtcaaattcgtgaagcataaagggatttactagggatattaaattccttgcaaattgttgaaaagtcttaaggaacatgctcctggcaaagcctctagaacaattccaagaatggcactgctggtgcaggctggggaggagctcctgctgccttagactccacattcaagctgtctcctgcagaaaagagagcagctcttctcactactgcccccagaaggacagccgctctgctatcaactactagaaaactgacccctttctctgcatacctgcctgtgttgattacatcttcatgtcagtctcacatagattcatctgttttcaaggctgcagggtttatttctgcccaagtccatcctgtggctttctatcataagtacacatctttctacacttgaatttccaggcattactagtatcaaccacaacaggctacaatctaacataaatattttctttacaaagaacatcatgctaccaatgtagcactgtgctccccaaaatgtgaggaatctccaatctgttcagcccaacaccatccaggaaaaaatgatcttctctcatgagccattaatctgtgtacatattatttaatatgtggtctatattataaaggtggctaaaaatagcactttgatttttttaaagaaagggtgtattgaaaagactaaattatttaacatacatatatgaatggctcatttcgttattgtcaccagcttcttccgtatttattttattctctagtttctggcaataatttctctatggtagagtctggaaaggctattcctcatgtccttggcttcctaagtcccataggtggtgaagaatgcccatcagatgtgttactacagagtgcttttggattgagatgagggaggggaagtgcctgatctcactcaaatgtactcaatttcctggtctgggtcacagccaggcagcacagtcttgtgggcacagtatcttcacttgccatgtttctatcaaaatgagagtatcttccttcactgtggaaaacacggggtgggcagggtgagggaatagcaaagggagtacttggagatccctaagctgccactggtttctccaaatgttttcaatccatttaattcatgataataaacacctttctacctaaccagtcataatcgcttttctcagatccaactgattcagtgataaatctaaagagaaaaaataaatacacttttccacgtttaagctgaccatgaatgtttccacctccatatcccactatgcgtttcatcttccctttgcctcactggcgatccaagtgcaagtaatgcttcacatgactgtgatccctagaacttctacctgatgactgttgacgtcttctctgagttttaccagtggaaatggcaataaatagaaacattccagaaggtcccctagggtgcatattttctgtacttcctctctaagatatgtaaaatcaattccatttgctcttgctttatatgaactagacctatggccccagcaaacaaactaacaccctgtgttgacaacttatccagtattgtctttaagtctaaatggtcacatgcttatatcatttcttccaatttcttgggataattgtcatgtcaactctttggattaagaatcatcaaccaggccaggcgtggtggctcatgcctgtaatcccagcactttgggaggcagaggcaggcagatcacgaggtcaagagatcaagaccattcctggcccacatgttgaaaccccgtttgtagtaaaaatacaaaaattagctgggctacaggtggtgtaccccctgtagtcccagctactcgggaggctgaggcaggagaatagcttaaacctgggaggcagaggttacagtgaagccgagatggcgccattgcactccagcctggcagcagagtgagagaccgtcttaaaaaaaaaaaagaaccatcaaccagaaaaccacagccctgagaaaacagaaatagagtatttcaagctgttcagttggcgttaacaatggtaagtctacagctcattttcaagatatatatattctgtttaagggagtaaaagcacccatcacggttaatgtttcagagcctccaccacttctgatcgtatagtaattcaacagcacaagggtttgtgtgacagctttgcttgactaataataggtttttccctgtctatagggaaagttgcacctgtgcacaagacaagatcataagctacacttcgctcttcttttttgaggtaaataacttgcttgatccaaagccattttatggaagaatttcctgattctgatgaaagcacttggaaaatcctcaaataatattttatgcagaaacataaccgataagaatggcaaattcatatataggaaaataaccagtgctttccttatgttacatgaggtccactagtatcacctaataccagctgttagtctgagccctgatgtatcatacaatgttaggggttcttcttgacaaattagatgttcagaaaagccggtagccctgtaggtctcagttagttgaaagtcatattattgagccccccagagacctccataacattggttcatgatactccctgggaaagctgggaaaggtgactgactgaagtccatgtgttgaatcatcctcattattaaaagccccctgctcattaatggcattttgattaatactcacttggaaagcatttttttggattgtggctcatttttgaaacatctcatcatagctcttccagaatggctttgtctgcaatcatcctgttgtgtttcttttaagacctgatgatctgttaaaaccaaaggccaatattataaaaatcctcttctctttgcaatgggatcatcagatgtaaccttacagtttacccacggttaggatttttacatttccagggcttccttgacaatggcactgatgtgactccatccagcatctattgttgtgaggactctatctggcatatcatcattgtgggcatgaacataatggagattttcacaggatgcaatggttaatattcaacgttagtcaaaatttcttctagtcctacccttggagctctactgggttggaaaaatattttcatgtaaggacaaccatttggtagagttttaaaaataaaggctaccaataaattttctgtagcaagagtatgaactatttgtggtccagaatacaattttttatggaatgtaacaaaaattatttaaatgtattcaatgtagataataattttacaaataggcttatattgcatatataatagaagaaacacaattaaacataaatactatatatatgtagccattttaacaaataagtatatatttatttatacatatcttacatacatttatgcatatttttccacaaataaggtaaattttaattttttattgaaatattagttttaattttgtcattaattttcttttaataactttataatttgattactaaatattcacatttataccaccaatttaagaaaaaatacatgtgtgtatatataggtagaggtgtaaataatgtatcagggagcttttatgcataatgattggtaactggctaaatacacaactcagtgactgataacagtaaatatttgttttcatgttcatggatgctcatgttcacaatcatctggctgatcaaggaagggctcaggtaagtggtttctctgcatggcactgagcttgtcttcagcctatacatattaattgtcttaggacaaggctgaacagcagtgactacccatgactcaagattcttctggcaggtcacaagagtgaacaacatcccaaaccaaactgcacagctgagtttaagtccaataatttctaacatagcttcacacattttaaatatattcctttatttcagtgagtacaaatttttaagaaaatgttcactccatttaattatagaggtgtttgatcattccatggacaaataactatgatttcaacttacagtattgaaaatatttgcaaatgtaaatttgcattaataagaaactgaagctggatgtgttttcaacacgtggctttaaatataatatacttaaatggcctcatgggagaaaattcattttaacttacataaatatccctttttgcctctcttttgtcctatagagttgcccaataagaggtccttccatgagatttggaaatcagaaaaggatgactcaatattctccattggtacctaagacagacacagggacagggatgaggacaggagaaacacctgaaaagatgctgtaggaagctgagagcatcagcacccccacccctaagcttccagacaggactgaggaccacatggttagatagcccatactttaggggcagatggattctgttttctgagggagcaccagagaatcctgcttctaatgtcagctttcatgactactatatccttggccttgaaaggttgcagtgtgaacgttaatgtaggaattgggtcattcttgacatacccaacagagccaagaaaccaggagggaaagacactcagggtgtaaaatattgtctgaagaatgcaattgaaataggccctattatcccatggaagtaatgtttatggttttttgaataaacatagaaattgacttccccagtcttaaaactcaagttagttacatttgtcttatctgagttcctttttcaggaaacccaccaagaggcctccagatactatcagagagctgaaacttacatatcactgaatcaggacagtgagacgtcagacccttcacacattgtgattgcctcactgaccttctgcttcctgttgacaaaattaacttcattacccctccctaattcctgtttgcccacatttcttccctgctatataaccccctaattttagtttgtcagggagatacatttgagaatggggtcccatttccacagctgcagcacctgattaaagcctgtttcttggcaatacttgttgtcttagtgattggttttatatgtggtgagcagcaggatctacaccaaatccctggcatttcagtaacaagattctctgcaagcttcactgctttggcctcttgtaaccggaaatcaaattcaaccccaacttctgaataatttaacataattctaggattcagtttgtccatcagtgcttaccattctgagcttgccagctcccaaaattttctggagccaataaactttctcaaagagcaataggtaacattttccttttttcatgaaactctaagcttctctttgttctttcaacatattgaagaccattgagtttttctgtatgccccatttagcaaatatttcttagcaaataaaacatgaaatttgagattcatctctatatttttatttagacttccatagtttatactctatttctctgtatcaagacaattcctgcttagaatatctatagtggcttcttctctgttacttgaattccaactgaagccataaactagactcctcaggtgtcatgatccctgccttttttaaatcaggagaggaactgttatgtctgtgcacctggtgctgagaaagaaaaagaaattgggatgcagaggtgacttcacatccccctctaccaacaccatcagagtgtgcctgcatctgaggaacactctcagctgatggaggaatcaggaggagcagctggggcagcccggcctcacatgtctgcttccctgggggtttatgttcaggtttgtaacactgtgggagggtaactattaagctgttgacagtaataagttgcaaaatcttcaggctgcaggctgctgattgtgagagtgaattctgtcccagatccactgccgctgaaccttgatgggaccccactttgcaaagtggatgcagcatagatcaggagcttaggggctttccctggtttttgctgataccaggctaaataactgctaatgccctgactggcccggcaagtgatggtgactctgtctcctacagatgcagacaggaaggatggagactgggtcaactggatgtcacatctggcacctgagattggaaatataaacacaaatgtccatagaattaatcatgttgtaagagaacttccctcaagagccaggctgtacggaacacactgggctgagtaaattcctagtgttctccttccttacctgggagccagagcagcaggagccccaggagctgagcggggaccctcatgtccatgctgtgtcctgactgggactgactcctgcacaggtgtgaccagcctattaagaagtctttagggcagggggtggtgctctgggaacaagcaaatcggcagggggtggggcaggctggatacagctgcgtggctggcttatctcagtaactcagcacaggggcagtgtccccagtgtcccaggtcagaccagggcacctagatttgcctgcagagaatgtttcttcctaaaggatattttgttaccaagtacatttttgagcatttattggcaaatctcgaagtggttgtgagaactagatggaataatatatttcaatgccgtattgggcataagtaggagaatatccttgtttgtagagaattcttaataaagtcttagagagtggggctatcaggtcttcaacacactgtgaaattgttccagttgggagcgatactttgtgacatacatactacatttttgtaagcatgaaattgatctttttttaagtaaaaaagaacacttagtcatgagcaagtaaaatgttctcaaaagcattttgtaatggccctaaaccaatgttattaccagtctaagctgaagaggtttactgcagattgacaaagaagatgatattgggattccttaaagcatatgacatccacagttcctgcattgtccagagctataagtctctttaatgctcgagttttaatgggattcattttattctctgcttggggacccccatattctacccccttttctgtcattgtgaattatttcccatggtccatcagcataaaagtctgactagcaatgctaaatctgattactttaaaacaattttttttcttcttctactacaggagccttgattagcataaacttgaatctttgtgttagtttgcttaggataatggcctccagcaccatccacagtgttgcaaaagacatgatctcatttttcatagctgtatattaagtattccatgttgcatatgtaccacattttctttatccaatctacaactgatgggcatttaggttgcttccacgtctttgctattaggaatagtgcagtgatgaacatacacatgcatgtgtctttatggtaaaatgatttatattccttagagtatatatccaataaagagattgctgggtcaaatgatatttctgttttaagttctttgcaaaattgccaaactgctttttataatggctgaactgatttatattcccaccagcagtgtataagcattctcttttctccataaactcactagcatctgtcatttttaagtttttaataatggccattttaactggtgtaagatggtatctcactgtggttttgatttgcatttttttaataattagtgattttgagcactttttcatacgctttttggccgttaatatgcttttttgaaaagtgtttggtcatatactttgtccactttttaaaatagtttttttttgcttgttaatttgcttaagttagttggaggttttttaaggaaaaaaccagaataagagaaaaagaggaaaatataataccacagaaaacacagactgtggtaagtattgcctcatggatatatatgtgtgtgtgtgtgtgtgtgtgtgtgtgcatatatatatatatatttatgatacatgctgtgtttatgtgtataatgatgatccagaaactaaagggtgactggtttaaggactgcctatgttgcactgaggcttccttcttttcaaattatgaactaaagggtacagcagtacttgcatgactctcaaaaattctagcagcatgagatagaggtagaggagatttactgagatagatgcattggaagctgtagaagctcgtcctgtgctgttgtggatgttgtgattgtagtagttgttgttagtacagtgggagtaaaagcagcttgaagatttacaagctcttctcttcctcatacttacaactccctctagagatgcatcagtgattgtacaggcatctctgacacctctggagaaatcttgttagctcaatccagaatcttacctgataaatgttttgagtctcaaattatgtgaaactagggtgtagaaaaaggactagagcaagggaaaataatgttcatgcctgcacagtggttgtagacaggtaaatggggggctttataagtgtgatgatgtgccaaacctctgtcaccacggggagagaagcatcaaaccaggatcacttctggaagaatcattaggttattttagatggaaggaactgtgaattccttgccaaatagatttttaaaattcaaagctactcattacgtgttaatattatttaacttctttaaatataccatgtggtagagggcacatccactatttcaattcagggtttgtatgcctatgtgaattacaccattaaaaacacagcaaattccatattggttggggaagaatgtttgaacagtaatcaatttcgtgaagaagaggtttatgtcacagcactttccacagtattacatacaaaaacagtgaatgatctcatatccacaagaaccagcatttctcatgtgccacatatgccctcccagaaagaattgaagcctgtgacaagttgatgaaaggggtagaaaaaagaataaaaccccaaaacacagcactataaatggaaaggggaaaatcattgcagagcctatgattataaaaatacaaaaggtggatattctgagtatttttatggcaactagcttgacagaagtaacaataactttgtattataaatttacccagaacgaaatttccaattttatatctgcctgactggtgtcttgataccttatcaaaattacacaaattttcaagagattcaaaaagaataaatactcccaaacttatcatatgagatcaccatatactccagtccaaaaacaaacaaggacgtaacaaacggagaaattaaatgctggtatctcttgtgaacataaacacaaatattctgaaaaatagggaaagaaggaaaatataatcatttttatacctatatgtttgtgaacacacatggttaagtgtattacagtttttatgctaagaacacttgatatgtaattacaagttctaaaaaattgatatgaaacggaagatgtgacagttccattttcctaacttttaaaagaatatttcatcttatttaaatattatttttatttttgtatgactttttgttttgcttagacttttagttgaaatgaataatgaatgtgtattaaaagcctaccattttgatttaatctatgaagggtatttaaattctcattctatagaagaaaaatccaaactccttagaaaagagagatcttgccaagagctacacagttcttgtttcggagctgagattttctctcagatattctggctcatacaattttcagtacactacagatagaagatgcaaagacaacattacccaattggtcttgcacttactttgttcactgttaactaagtttactgaaaaaaaattacaataaaatacactgtcaaagaactgtcacaaataaatacatctgcagaaccacctccaaaatccagacatagaacatttctataactcccaaaagttttgacctactcttttggaatccacttgctttccaccacacagatcagggaattcttgatctgcttattgtcagtgcagattccaatttctttttaagggtttcatataaatgaaatatagcatgtgctcttttgcatctggtgaattttgtgcagcataactgcttctcagattcattgagatgtcatgtgttccagttatgtgctcctttttatttttgagtgttatttaactgtttggtaattttataatggatcctttcacctgttgattgccatgtaagttgtttccactttgggctattacggataaagctgctatgaatgttcttgaacaagactttgtatgaacatatctctttatttcttttgggctaattcctaggcgtgtagttgctgggtcttacagtaagtgtttaatactctgttcaactttttccaaagtggctgaaacattttacatgtccaccaataacttattatagctccacaccctccaactgctgttttgattttttttttaagatttcacctaattgtcactcaacagtaaccagaatagctagtgattattaagctatgtttttctgactattttcttgtcaattttggtggttgatgtgtttcaggatattgagaatagaatcaatgccatccaagctccttttcaaataattttatcaagccataatatttaagatggtaacaaggtatatacaaggtgtgttgggagtagtaataagtgttttcaacatttattattatcgtactccataaggcaatatgtcttcaatgaaatagtgtttaactagacttaggatagaaaggttctcatctcaaccctagtattcaatattaggaaaagtttaaggaaaaaaaaaaacatccaggaaaataagtcagagagtgttttgctagtcaagaaaaactgcaacactgatgctcttttaatgccagaccttcacaataatttccactcagatcatttggtggcctccttgccttgttctccttatgggacttcattctgagggcatgtgacatcacagagggagcagtgcacttgggtacagaaatatggcttaggggattgtctggccttagaggtggctgcaatggaatatacattttcaaggaagttccctgttaaagctgataaattgttagttaaggcaaggtgcaggggcttatgcccgttatcctagatgtttgcaaagtcaaggatggaggacagctgaaagccaggagtccaagaccagcctcgaaaaaataaggagatccccctgtctgtagaaaaaaaagaatgtttggtaagatgtggtgtgaacaatgacatctataagagattatttattaacatttgctcagaaaactagaaaatagaatgatgtcttataatccatcaatatcataataaaaatgctaagtttttcaactatggtaaatatagagaacataacattgcccatcttagccatttttaagtgtacagggcaatggcattaagtaagtcacattgttgtgctatcatcaataatagcaatctccagaactctttccatcttctaaaactgaaactctatttcaattaaatgacaaccctctccccatttcccctgcttcaagttcctggcaacctccattcaagttctgtctctatgacagtgactactctgaagcaggttcactgtgccctggttaccaacttatcagagtccagggagacagaacaatcatacacaacaagttacaagaatctggtgtagtatttataggtggccaacaagggactgcagaagcctaggatgtattgtgggtctgtcccctgaggcacaggcatgtgggtctgatggaatcttgactgtgtgtaccccagttggaccacaactcagcaaccccagaaagaagatgctctgggtttttaatcctggtgtcacaggacacatggagctaaagtactggaggactaaagtactggaggacagtactaggagaagctggaacaggggcaggctcttctgaccagtctctccctatttcagaatgttacatttccagcacattctacagttgttcttgagaagtgtaagaaagagagtggggagaactaactgagtcgagaaccattagaggactgtactggagtcacccccaacccaaacacccccgttagaaagccattccattttatatgcctactaataaccctgaactggtggcagaggtgtgtcttgtttgactgatgaagcccctcgacgaacacaatgtcaaagcaacatcatagagccagagccagaatagatttcactgggccaatgaaaactactaccagaggcaggatgatcaggcccacctgaagcagttatgtagcccaggatccaatgatccacagaagaagttgctaaaggggtgaaagaagaatccttcaggtgggaccattttcttcaattacgagcctgtttccagatctcctctcttgaatttctaggatacctgaggtgtttgtccaggtacaacagaaagtgttggaaattgtatacaatcctcccagttgggattttaaaaaagtctagagcaacactgttatctaaaacatccatcccgatggagttaagggatgtctgctgggctaccaaggcagtggctatggaggaggagccatatctgccatggtcagggacacatttcttatcatttctcttttttacatgagcactgactcctatacatagtaccaaaaatatcacaaaagacataaacccatagtctgttataccttctggcaggtccctagtaagtctgaggtacagctttgggctgcaggctcaatggttcacctaattccaaggagtaatatccagagacaagcccagcatgcccaacatgcagaatctcaccatcccacagttatccagagatggcatcacacatcctgcattttgttcactcccagaccattcacagagaaatatgtagcccttgggtgcatacagccccctttctcccattttattgtttaatcacccagtcatggttatgcaggtattggtgtgttcattagccaagtctcactgatggcagagttgaaggagcaaagttttgctcagacaatattgttcatagacagagggtagcattagtcctctccttgtttttgtctttgccattggggcatttcttatctatgcaatcaaagaaatatggtacatcaaaatatcagtccaccaatgttttttttagttgtggtcatgacatttgccacagagtcaatttagttaaatggggggcctccagttttctcccatgtggtaggtatcacatcctcagttggtaggccagtgcccgggtcctgttgatgtacaccatgatatcagtaatgttggtgtcatttgccttcagtagaatgaaaggaaacctctagttagtgacagaacgaggtcaagaatggcagattcagtattttgaaagattacactcggtgacttgcaagaagctaacaaagatgttatgcttctaggcctttgctgcctcattcttgccaaaatgcagtgtgacaggttagtgcatcatctctcacccatcccagggtctcaggtgtctcctacccatctacaagggttaggctgtgttggtgtaagaatgcggcctggctgtccttgctctgtgaaaaatccattgcctttgtcacttgacccagacatttcagtcctgattgtccactgcaggaagggagattatgccctgtaaaaacttgacatatttcataatatcaccaatactaaaggaaggataagatggccctggcaccagaagagggcccctagctccctgatatttcttagtcttgtcatccatcctgtgggatcttgtagaaaagaggcatttagaggaaacataatccccatattagagttagggggcctgtctggggtaagatgatggcctgaattgaaaatcaccccagggcatgcattctaaaggaaaaaaagaaaaagaatggttaggaacactgaaatagctttcacaggtccagactaataaagggtctgcctggtctaccttcgtttccactcagcattatgttccttaacattcattatttcccttgttctggagtgcgatatttaatgcccatattgctctagtaagatggggtaccaccccattagcagactttctagatgtcctttctagatgttgctgtgtgagtccattgttctagcattcactagattcattggcctgtggatgcagggtgcatggaaagttcatcgtgttccatgagagtgtgcctattgtcatgttgcttgggcagtgaaagatgctccttggtcagtgtgaagtgtcattgggtatccaaaaatatgatgtaagttcctttcaagggtgaccttggtagtcccggcatccaattgagcatcgtatctctttttcctgcaggtggaaagctgtggccatagtcctttcctccacaccagggattctttaaaagtccagtctctcagttgccattttcctgaacagatgttgaggctgttggcaatggcccatgatttagtgggaatgtggcatggtacgatgttggaacagcctgcatggccattaccactgaatgtagtttgacccactgggttgaaatcccatgctaagtttcagttaaaaaagtggccatccattggctgaatggtggccacacctggtggacctgtcagtttgcgttttcctcagccatcagtgactcctgccatatggaaatctctgaatcttgggctcgacatgggtaaatgaaaatccaaattatcacctacaagtcatttggtcccttcaacaacctctccatttgttcatggagccacagatcctgtggggtcctgactaagcctgatcaagaatgtgccatttccatttgataacctgactctgttgagattgttactgccttgaaagccaggcaggcgcttctcaactctgtgattcttcccaggaaatacgtgagaacttccatctgggttcatatctcaaacacaacccaccagtctctcacttgctgccctctgctcaaaatcttcacattgtaatttttcatggggtaaaaagttagcttatatattatcttgtattcattcaaattctgtttaaataacatacatatgttcctttattctttcgaactttgtccttatttttgaaacccagctttggagttcagaaagctacttttgtacttcaatatgctgtgagtgagactgtgcaaacactttagcaactaggtctttatttttgcatacatttgccacaacatatctagtaattaaaaaatctagactgtgaagagttttatttggcttctccctgaaaaaagtaggataaaatacagtgcttgctgctgttctggtcaagggtcggccttacaaaaagtggaggggggaggtggaggaggggagggaaactgatttaatatcaccagatcttatcaatgtacatgtactctggtaactgctaaaccaaatcaaaagaatgtgttagttttgtgttgccagtaatcagtctcaattaggtgcctgttatgcagaatgaatttagttgatgaatgaacatagggaaggaagagaggattagaatgagctctcattgagccttctcttctcttgtgtctcattgctcagagggcacgtggacctcctccatactgcagactctgtcatgcaaaggctgctgcagctgacgggaccttaaaatgtggtgcctgaggtgtagccaagaaatttatggtcatgagccctcagctgcaccaagtcctctgagttctccaacatcttggtctttaggcatctaagagaatccacagtgcctgctctccacagaaacagcacatctgggcagctaggccacagcaagtgggggggtttgtgttcaagactataccattgtgggaggataatgtgtactttgctggcagcaataaaccccaacatcctcagcatccatcctcctgatttcagcatgaaatctgtccccaacccactgccactgaacctgtctgggactccagggtcgtgattggaaaccaaatagattgggagccaaggaggctggcctgtcttctgtaggtaccagttgaaatagatgtatccattactgtgaagggggctgtgactagacctgcaggagatggaggctggctctccaggggtgatgggcagggagagtggaggttgggtcatcacagcatctccattggatcatgaaataatgagagagaagtgcaaggttatgtgcaaacattgtgagtcattttaatcattttctgtctgttatttatgttttgctcaattatttttgtgtgtgtgattttgattaatcctcccaaaacatacagatttaaaaagaaccaatatttacatatccttgctccttctggaatcttcctcactctcacagatctagacatcacatgccccatcctggaggacaagacacatctaacacgaggacaggacacacatgggaggtggcggggtccacagagttcaccctcccaccccatcatcctccctcatttcccttctgcccttaccagggacccagagcattagcagccccaggagctgagcagggagcctcactgtgagaaggtgaactgaggagtcctgatcagtcaaggcaaggttagagtgagctttcgtctcagactcacaaggaaagtcctccctaggggacagtatgcaaatcccctggtgggtgcagtggggtggaaagagccaaggagaaggtgggggcgtctcttgtgagcaaaatgacataaatatattttatgtttttaaggaaatcaatagaggtaaaatctgtgttgcctgagtggcagaagggacgtatttagattttcctgctgtttcctctactagacttctagttctttaggactttctcgggcatgttttatgtttctttttaataagcttgatctttcataaatatttgatgattcttatttctttgtttaggtttatttaaaagagtctaggtttgtttattttattttattttattttattttattttattttattttattttatctaaggtaaaacacacagtgcaaagggtgcaactcttaagggtgcaaatgaatgtcaagatccagatcatttcatatcatgatccacatagaaacgcagaaggtttccaattctctcgctgctttcattatgcaccttcccagtcaaaaactgctgctcaaaacacaatcaatgtaaatgatattctgacatataattgttttagtcctggacttaatctttatatcaggtaaagtaaacattttttgtagcttctttctaacttttttcattttttgaggccttggttccttcttgtcaatttgagttgctgtctgctgtcattctctgttattctgaagaattttctcttgaatctcttacaaggcatatatgctattaatgaattaatctttgtgtatgaaggaatatttctaccttgcttttatatttaaacgattgtttttctggatatagaatttgtggctgagaatttgtggctcagtatttaaaaatatcattccactgtcttctcacctccatttgtaatggtgaaaatttagccaatgattttaatattgcttcttagtataaagtaagtcggtattttagtgatgcatttcaaattctctgggtctttgtctttcaacactggtactataatgtgtatagttatgaattgtactgtgcttatcctaaaagggtttcactgagtttctttcatgtatagattaaggtgtctcatcactgtaaaaaatgtttttcattatttctccatttttttctttttcaatttttattttaaaatcagagcatacatgtacagatatgttacaaagttattttgcatgatgctgggatttggggtatgactgaacttattaaacaggtagtgagcactgtaccccataggtattttttcagcctctgcccttcctccctttgtctcccctctagtagttcccagtgtctattgtgcccatcaaccgtggattggataaaaaaaaaaactgtgtatagatacaccatggaatcctatgcagccataaataagaagaaaatcatggtcctgcagaaacttggatgcagctggaggtcatttacctaagtgaactaatgcagaaacaaaaaaccaaataccatgtgttctcacttataagcgggagctaaacatggggtacacatgggcgtaaagatgagaacacagtttttagcctcttcctgtcttctcctttgtgattcctaatacaaatttgttggtattgttcacagggacctataatgtctgaggttttattcattcttctttataatttttcccttctttatatgaggtcatttctattgacttctttttcagatcactgactctcgcgtcatgttaaattgctgttgagtctatctaatacatttttcaattgagttgtacctttcatttttcggattcccagtaggtctgttttcatagttttgtgtctgtttgagagcctctatttgttgaatcattgtctttacaaattcctttttaagtcttttattataggttaaaataattatttgaacatatatttgataagggtggagcacacagacaccatggagatggaccataaggcagggagctcagaattggattagttgaatttggagtctctgactagatggtgctcttgtgagatttaattattttccatgtttcatgtttctcacaatacaaatagcttttattttttaagatggtaactatgaacagaaattcagcttataaattcctgggaattcctaataggaaaattgatgaaaaaatggtttttcttaggcccccacacctgcctctgcctgggacctgactttgtctctgagccggcggaatctatgatgaggttttgagttgggcagtgaaatcatggcagggcaggctgtgctctgggtgctgtggagaacaaggggacactcctgcagggttagtgatgctgggagttcaaggggagactcagcatggagctgcctgttgagtcaccccagcaatcctgtctggacagtgatcatctcacaagtgtacttggatgccagtggatggcccaaatgtgggttcaggttggacaaggacaaagctttagggatgaacatatggggctcatttgatagtctgaagtttcagcacaagcgtaatgaatcatatgggaaaagaaaggagtcacaaggttgtgacttttcatttgatattaaaatatattccctctgctcatttttccctacagaatgtaactactgttacatatttaaccaaagtcattgtttttaattttcattttagtaactgacagcctgtgtgcagagttcctaaataactggaaagccaggccgtcattcctatggctgaagccaggaagtgactgtggatatgaagaaatgtgagtttcatgtacatgtctctaaagccacgggccactgatctggtgggaacctgcagtcatttcactttctcatacccagatgagaggacaccttgatctgtgttcatctgatgatctgatgaactctaaaaactggaccatattctgaaggtctagttcacacttcttttctgtgctagagggactctactcacatgtattgtacactctgcataggacagtctgtgatacatacaagtttttttctgctaaatactcatcaatcttgtcatttatgcatcttctatagttgttacctgacctatggctatggggtcttccaaaagaatgggccagaggtggagctgtgaaactgtagctgaataagaagtgtaagtgtcaagatagggtaaagaagtgttgataataataatatttcaaattagtctgggctcttggctgtgattactggtaagtgggaaagagtctaggtttgttttttttaagttttattttaattgataaagtagccagggtaaagtgcacaaatcttcaatgtgcaactgaataaagtttatgtgtaattcattgtccaggtggaatgatagaatatttcacatactcttgtgcttccctcatggacaatctttgtcagttttcgcccctcccacccagccatagtaactgttattctgacatctaacacaatcacttaggttttcctgtcttgaacttcacataaatagcattaagtgtatttttctctttttagccttggtattgctccttacaatgtttgaggccttcatttcttccagtggactcaaggtcctgtctgatgtcatttcctgggattctgaaggattttctctcaaatgtcttataagacatagctgctatgaatgaatgtacttttttatcaaagaaaatttttttttgctttttctttagatgtgaaggtattttcactggatatagaattcctagtgacttttttctcctttcagcatctaagtatgtcatttcactgcttctaatctctattggtcctaatgaaaacttagccaataacaatatgttgtttctgtgtattggttgggagatgatgtttgacagtgatcagtttgtgaagcagaggcttgtgtcacaatactttccacagtactacatttaaaaatggcgaatggcctttcattcttgatgcagtgaagattttctgtctttcaacattttaatataatgtgttcagttattaatttctattatctaaaagggttttattgaattttttcatctaagaatattttttattacttttgaaaagtttttgtcattatttctccaaggatttttttttcagccactttctctgtctctcctcctttgtgactctcattatacttttgttggtatccttcactctgagctataaatctctgacgtcttcctccttttttttaaacattttatttagactcaataagttctattcctttattttcaagttaactgattattctgccatctcaaattgctattagacctagctaatacgtatttaaattggattattttacttttcatttctagagttccaatttggtcattttttatattttccatatcttttcttgaggccctacttgccaaatcttcttaatattttcttttttatgtcaatgatcatagttttaaaaataattatttgaaaatctttgtagtctttactaaatccgataattacggcaagttagaatcagctttcgttgactattttctgttgtcattattgtagttgctttatttttgttcctttaatattggtcattcttctagtttttttcccaggagctgttaaactgacaattttacatttttgataatacagtacctctctttagattatgggttttttaattttaattttaattttttagaaatagggtcttactctttcacccaggctggagtatggtggtgtgatcatagcttgctgcagcctcaacctcttggggtccagtggttctccagcttcatccacctgagtagctgggactataggggcatgccattactctctgctatttttttttttttaaatagtaagatattttgcccacccagcctggtctcgaactcctggcatccagtgatccttctgcctcagcctcccaaagtactgggattacaggcttgagccaccacgtcaggcctggaatttgttttgtttttctgatcattttttaattttcttcttagttacttgggtgaacttactgatagtacctgacttatgatgcttggagttataactttttgactttcagatggtatgaatgtgatatgcattcaagtagaaatagaaattctagtatttatacaactattctattttctctttcaatatagtattcaataaatgacatgaggcattcaacactttattggaagataagctttgtgtaagataatgtcgcccaagtgtaagctaatgtaagtgttttcagcacatttaggataggataggctgagctataatgttaagtggattagatgtattaaatgcatgttcattgcatgatattgaaaaatctatctcacgtggtgtttgaccactgatatcactgcttccttttattcttaatattaatatttagtttgaatttataggaactgcacatgtatctgcatagtgaagtggtcaccaatgatttgagacgttttgcttaaatatctagaggttataaatctatcttctgtcaacccatctgtgtgtagtttaaaaagcaaactgcatgcaaaatgcagctagttcttgaatccttctggttttactttgcaccggaaactccttgttctcatcactcatatctatatcttctaggtcactaggaatgtgtgcagagattatttcagcaatatgggtctatctcatccaggaatctgctatttactatcagcagatgtactacttgcctcaaacaggtcatcatcttggacttgtaaagctgtgagatttttctgttcatttcctatggagttctgcatgtttagctggaaacactgaataattttttttccactccttggctttactcaagtccacccactttggcagcaagctgctagttttttttgctacgctcatattggtaaaacttcagttctgtaattcatgctgattgagctgggggtagaaggctgctgtcacaggcaaaaggctacagacattttctgtccttactcaaagcactggtactttttttttctataaagaatatgcatccttaattattttatacttcaccaattttcagagtgctgaaatagttttgatacttcagctttatatttaaatgtgtgtttgttgtttatttttgcaccgaagatttattaaactctttgtgatgccataaacagagatgccttctaaaatgcatttagttgaacataatagccacggtgaaatggtacgatgcaatggactaacataagtaattttggacttgacaacttgaactccaaaatggccaaatagagctgagatgctaacactgagtggccaccccactagctgtctgtaaaggaagcagctggtataataatctagtaaacactgatggtcttgttggggtttttgtttcatgtggaatcactgtgggaggccagttgctacgctgctgacagtaataaactgcaaaatcttcaggctctaggctgctgatggtgagagtgaagtctgtcccagacccactgccactgaacctggctgggatgccagtggccctgttggatgcatcatagatgaggagcctgggagcctggccaggtttctgttggtaccaggctaagtagctgctaacactctgactggccctgcaggagagggtggctctttcccctggagacaaagacagggtggctggagactgtgtcaacacaatttctccggtggtatctgaaattggaaataaaacagaaatgcactcatgtaatcaagatcaaaccaactgtctttgagtagagccaaaattgttgatatactttgaattttaattatatttcttgctgagcagaggtggcaagagttttcactaatgtgcaaaaccacctcatgttcccctcacctgggagccagagtagcaggaggaagagaagctgagctggggcttccatggttccctctgggtcctaactgagcagttcctccccagggctctgacacaggcattgatatgggctctggaaggtagggcagctgggagggacatgcaaagcagctgggtgggagctgagcttccagctgcagagaccacctgcttcttcctctctgcactgagcatcctgcgccaccctggttgtcaggccagaaaagtctgttggctcagtctgagtgtagaacttctcccttgtgctcagagaatttcattcctatgtctttcttctcctcaatcacctaaattcacccagatgatgtttggcacaagcctgttaagaacaatataaaaggctgtgttttcatttctctcttcctatcctcaatatgcccagtcatctccctaagtgcattattggatcgatggaaatgaggagtctgttagaacttaatcttccagatacacctttcatttgcttgttagtaatgttttctgagggtcctgaaactttccattaacccagacacataccctctttgagttaaaaagttaaaacttctgtttacagtcacatgtcctggcagccctgacatagatgctccatggcttgccgattgcttgaaattgaccaactaacttaacttccctgtgtctcagtttccatatctgtgtaactgtgacaatactggtgcctaccttacagtgctgtagacagtttaaagaaaataagataaaacatttacagtagtactcaggacattatgtatgcggcaattatttttgtttttattgattaaatatttagcactacagtcatcatcattatcataaatatacttacttggcacagaaaagagtcttcaatctaatccaagaatgttttatcaacagtcaaattaaattctagggctttttcttcactaactgtacacaactcttaaaatcctaatgatttggtcttaatctgtgctaaaatgctcagaccttcaatcattcccgcccatctctgtctaacgcattaattctcatcatccattatcaaaatgttatcctatgaaagtttcccatgtcctgctgctttccttctttcttacataatctttagtctaccttgttatcttttgtcttatttttgccccaggactgacaataaggaaaagctaccatcattacttgtggacttgctccagtataattttgtcaggcttgttatcttggaagtgaggactatgtcttgcaaagaaacatattcattgggtcaatgtgttatcaaataaaagattttatctacttatcatccaataattaatttagactgacttgaacagattttttttaaggacgaaaaggagaagatgatataagaggaaaatacaatacaatatcaaatgctagctattatgactcttgcttcatggatttttacatatatattagacacatggtgggtatatgtgtgcaatgatgatccaaaaactgaatgctgactggcataaggaatgcctgcattacactgagtcttgtctacttttccaattatgaacagaaagctgcagtagtatttgtatgagtatcaaaacttctagctgcctgagatagaggtagagcagatttactgaaataaaagccttggaagtaggagaggttcgtcctgtgatgatatggctgttgctctggttgctgttgttaggaaatacagtgggagtgaaagcaagtagaagattgacaagctctgctcttcctcatactcacaaccccctctagagatggacagatgctggtacaggaatctctgacacctctaaggaagtctctttgctttttccagaatctttcctgacaagtattgtatgagtcacagatgaggtggaagtgggtgtagaagaaaggactagagcgagggaagaagttttcagtcccaggtagttgttgttgccacggggaaactgaatttttcaaagatttgtgccacacttctatcgtgttggggagagaggcatcaaaccaggctcactcctgagagaatcattacattattttagagagaaggaactgtaaatttcttgtcaaatagatgtttaaaattcaaagctatcgagaccatcccggctaacaaggtgaaacaccgtctctactaaaaatacaaaaaattagctgggcgtgctggcgggcacctgtagtcccagctacttgggaggctgaggcaggagaatggcatgaacccgggaggcagagcttgcagtgagcgagatcgcgccactgcactccagcctgggcgacagagcgagactctgtctcaaaaataaataaataaataaataaataaataaataaatataaaaacattcaaagctactgattttgttgttgttgttgttgagatggagtcttgctctgtcacccaggctggagtgcagttgcatgatcttggctcactccgtttcccaggttcaagcgattctcctccctcagcctcccaagcagctgggattacaggtgtgtgccatcacacctggctaaattttgtatttttagtagggacggagttttgccgtgttggtcaggctggtctcgaattcctgacctctggtgatctgcgcgcctcggtctcccaaagttctgggattgcaaacatgagccactgccccggccctactgatgtattactattattcatcttcttgaatacagcaagtggtaaggtgcaaatccacaatttaaacttgagatttctactcctatgtgaattataccagtgaggaacagaaaaattctgtattgtttgggagatgatgtttgacagtgatcagtttgtgaagcagaggattatgtcacaatacgttccacggtattacatataaaaataacgaatggccttaaacccagaagagtctgcatttctcatgagccatactaccaccaagaaagaattgaattgaaactcgtgactacttgatgaagggtgtataggaagagggaaagaaaaaggacacaaaacataatattgtaaatggaaatgagaaagtcattacacagcctattagagtaaaaaaaataaagagaggctaaatgagtaactttttggcaactaacttgacaaaagtggtgcaatcttcacctcctgggttcaagcaattcttgtgactcagcctcccaagtagctgggattagaggcgtgtaccaccacttatggcccttttttttttgcatttttagtagagacatggtttcaccatgttggccaggctggtcttgaactcctgacctcaaacgatctgcccacctcagcctccgaaagtgctgggattacaggtgtgagccactgtgcccggccttaaagcagtattttcatttagtaaagtgtagaagaaaaaacataaataaagtgacaacaagaaaacaaaatgccattatgaaaaatggtaactttagggcagaaaacaagaaaaggcaaaccaagattctcataaggtaagcctccaatccacaatcctaggaggaatgtcaatgctgaaaaccctggagcatccagggagtggccaaaaatactaaatgctgaaaacccagagtacccgagtatcagcctatgagtgtccccacaccaaatgccaggaaaccctggaatatccaggggctgaccagtgcagaaaatcctggagcctcagttgggtggccaacagtgagccccaaaggcctgattgggaccacagaacaatgtgactctggcttcttacggccaacagaacaggagaattcttacatccaagtgtcctgccttaaacaattgcacaaacacaattagcagggagccaaagccaaaactgcaaagcaaacacatatatcagggcagaaaataagataaaatggctgatggataaataaaatggcattagaggagaaatgactaagagaaggaccaaggaggatgtagtcaggtgtgctatggaggacttcaaatggactatcgagtcaaaggccttattccctggatcatccaatataggtcaggtgggcagaggggacacttacaggtgtgcaggagccaaaatggtgccaagcagtctctaacgtggggcctgcgtgaaaatctctccaggctccccagcttgggtgggttgggctcctacggggaactggagcacggagcggctggcctgcatgaagcagtggctctgtggccacttgcccatccccagggctccaccgcctgtcaggaaagatgatggctcttaaaacagcctttggctagtgttaacagctctgcaatgttagcaactctgtagctttgatcgctgtagcactgatcaccgtctcaccctctctcactgatctctgtcttcccaattctccaatagctgtcctgctcattgctgaccgctatgtccatcttctcacaaaatcccatctcttgctgtctcttgttgtcttgctttctctgctgtttctgctgtctcactgccacatcagacgctgcctctcaccatctctagagttgagtggctggcttaatcctgatgcaaggcaagttcttggatttgctcgggaaagaacgttagagtaagccggtgattgaataaaacagctttattgatggggcagcagtgttacagctctgtgactaagcctgtggagcaggcataattcataggcagagggccaagagtagcagccaggtgcagttttacagtcacatttatacccacttttaatcatgtgataattaaggggtgggttatcgagaaatagctcgaaaatgggtcgtgttgccccaacttcccggtgttgccatggcagggcagcaatttccaggtgttgccatggcaaggcgctgcgacttctggatgttgctatggcaatggtaaactgtcatggtactggtgggtatgtcttacggagaggtgttttcagaatcctattcctgttttggccagcctcacatctggtccagagtgaagtgctgcctacctcttacctcaaaagtaacaagaaatctgtaataacaagttacccagaaaaaactccaaattttatttggtggttagtgacatggtacttatcaaaattacacaaactttcaagggaataaaaaaaatactcagaattattataggaggtcataatgtcctccagtccaaaaattaatgaggacataacaaaaaaaggatattaaaggctggtatctcttatgaacatagacacaaaaatcataagaaaaaataaaaatggaatccatctgtgtatctacacatttagtgaacacacgttgtaaaaagtgttacagtttttacgataagaactcttgataggtaattttaatttctgaaaaatttatatgaactataaggtatgttggatctctttccctaacttaaaaaatatttcctcgcatttaaatattttccaatttttaataactttttattacttagacttttagttgatataaataagaaatgtgtattaaaagcctaccattttgatttaacctatgaaacacatttaaattcttggaaaaatccaaaaatacctagaaaagtgagctcttgctagaagatacacagttctttagtgtcaggctgagattatctaccagaaataacttttggctcatgtagctttcagtacactgcaagaataaaagatgtgaagacaacattacttaattggatttgcaattactcactattcactattaaccaattttattgaaaaaaaatgattccaatcaaatactctgattttaaatgtactgttgaacaagtacactcgtgtaaatgcctccaaaatcaatacacacaacatttctataactccaaaaagttttgtcctgctcttcaggaatcaacttgctttccacctcacagaacagaccatccttggtcagcttattgttagtatagatttcactttctttttaagaattttacataaatggaatatagcacgtgttcttttgtggctggtgactttcatgcagcataattgtttcctaggctcattcatgtcgccctgtgtcctcatgatgtgttactcttcacttttgggtactatttaactgtgtagtaatttcacaatgtatcccaccacctgctgatagatatgtgggttgtttccactttgggctattatggataaagctaccaagaatggtattatacatggctttgcatgaatatttctttatttcttttaggcaaatacccaggagtgcagttactgggtcttacagcaagtgtttaatactccaccaaactgttttccaaagtagttgtaccattttacatctcagcccagaattgatgagtgttctcaatgtttcagctacttgtttttaagaatttttcttaatcttcactcaacagtgaccagaatggctaatcatcattaagtcatgttttccttacaattctcttgacttttatgggtgcttgacttgtattaggatattgaaaacaggatcaatattgtctaaaccccctttcaaacacttttcctaagtcatgatatttaggatgataagaggagatctaaagggactgctggtagtagtaacaggcattattcaatatttattatcatactccataaggcaatacattttgagtgaaatagcattcaattagactcaggataaaaagcttctaatctcagctttagcattaaatattaggaaacctttgagaaaacaatccaggaagacaaatcagagtgttttgctagtggagaagtgctgcaacacctaaaccctattaatgccagatctttgcagtgatttccactcataaagttgggttgactccttgccttgttctcctatgtgtctgtgtgacttcatgctgaggggatgtgacatcacagagggagaagtgcacttgtgtacagaaacatggcttaggagattggctttggaggtggctgcaatgaaatatacgttttgaagaagttccctatgaaatgtcttataaactgtttcttctggccaggtgctcgggctcacacctgtaatctcagcactttcagtgaccaaggagaaaggatcaggatcatgtaaggccaagaatttgatgcaagcctgggcaacatagggagaccccatgtctacaacacacacacacacacacacacacacacaatttgtgaacaatgtcatcacaaagtgattatttatgaacatttgctcagaaaagtagaaaataaaacaatgtcttctgagctaacaatactataataaagacgttagttatttaactatagtaaatacagagaatataagattgtctatcttaaccatacttgagagtgcagagaagtggcattaagtatattcacatgttctgccattattactgacataatcagtaaaaatcttttcatcttataaaaattaatatgtataccccttaaacaatactccacccattttctctatccctacctccagcaacctccattgcagttctgtctttatgtcaatgacatgtttgaagcaacttcgctgtgcactggttaccaacgtacttgagcgtgggggaagagaacaccccccacagcaagttacatgaagtgggtttattattacagataagcagcaagggaacacaaaattcttggactcattatgggtcagtcccccaaggcacaggaaagctatgtggagctgatggagttgactatgtgtaccccacatacaccacagtgcaggaactcaggaaagcagccactctgggttttgtatcctggggtaaaaagacacacagggctgaagtgctaatggacattctattctatgggaaactggtatagaggacaggtaggttgttctgctcagttcctgtctatctcaggatgttacaattccagcacgttctgcaattgtacttgagaactcttaaaataagcaagaaagtggagagaactaagtcagtccagggtcattgcagaacggtcttgcagttatctcatcccccttagcaaagctagcatacttcatatgcccaccaacttcccctgaactggaggcagaggtttatcttttcagattgatgaagcaccttgacttacacaatctcaatgcagattatgaagccatagtgagagtacatttcactgggccatgaaaagctagtaccactggtaggaggataaaactccccaagcagtgactaagatgttaagaggtgaaagggggatcttttgatgtcctattgtctgcagccagtgagcctgctttatgatcacccctacttgtatttctaggatatctgaggtgtttatccaggtacagcagccagtgttgggtgttggtaattgcatggaaagtccatttgtttccatgagagtgtgcccattgttatgttgattgggcagtgaggctgtttcttggtcagagtgaagtctcatggaatatccaaaaacatgacataaattcctctcaagggtggccatggtagccccagcatctaatagagtgacatatatttagctgtccaggaagcaagctattgccatagtccttttctccactcatgagatcctttaatagttcagtcactcagttgctattttcctgaccagacagctgggctgttggcaatggcccatgatttagtggaaatggagcaaaatatagtgttgggggcagcctgcatggctactatcatttcatgtagtttgtcccattgggcagaatgaccatgttcagtgtcagtcaaaagatgccatcccctggctggatggtggctgcacccagtggatccactggcatgtgttttgtacaatcatcagggccccatgccatactgacacaggcatgtctctgaatctttggctctatgtggccaaaggagaagctaaattgtcccctatgggccatttgttcccttctagcaagcttgccatttattcatggggcacatgggtcctgtgggatcctggttagggctgattctgactgtatcatttccacttaatgatttggatctgttgggcctgtccagttttattgattgtgtttgtaggtaccaaagtgagaatggttagttaaggtcgcagcgtcctgcctggtgctctagctctgagatactcagcccctatcagtttcctacagcaagcaaggagctgccattcaaaagaggcacaactgttggctgcttcaggaaattttgtgtccaaaatctgagtctggtgcacccagtgacagtagaatcacctgacatcagatgttagtctgagccctgatgtgtgatacaatgtgaagggttcaggaggggtcattcttcttggcaaattaggtgttcagaagagccagtagcactctaaatctcggttgggggaaactcaaattattgagtccccacagagacctccataacattggttcatgagactcccagggaaagctgggaaagatgactgactgaagtccatgtgttgaatcattctcattattaaaagcccctgctcattaatggcatttcgattagcatccacttggaaagcatttttttttttggattatggctcattttaaaaacatctagtcatagctcttccacaatgactttgtctgtaatcatcctgttgcatttcttttaaggcctgatgatctgtcaaaaccaacagccaatattattaaaatgttattctctttgcaatgtgatcatcagacataggccttgcagtttacccactgttttgatttttacatttccagggcttccttgacaatggcactgatgtgactccatccagcatccattgttgtgagaactctatttggcatatcatcattgtgggcatgaacataatggagactttcataggatgcaatgattaatattcaacattagtcaaaatttcttctagtcctacccttggagctctactgggttggaaaatattttcggacaaggacaatcatttggtagagttttaaaaataaaggctacaaataaattttccatagcaagagtatgaactatgtgtggtccagaatacaattttttatggaatgtaacaaaaattatttaaatgtattcaatttagataataattttacaaataggcatatattgcatatataatagaattaacacacttaagtatgagtactatatatatagccaacattttatcaaataatatattgacttgtatgtatcttacatacatgtatgcacattttcccataaatatggtaaattttaattttttattgaaatattagttttaattttgtcattaattttctaagtttataatttgattactaaatatttacatttatgccactaatttaagaaaaaatacatgtgtgtatatataggtagaggtgtaaatactgtatcaggaagcttttatgcattaatgattggtaactggctaaatacacaactcagtgacagaaaatagtaaacatttgttttcatgttcatagatgctcacgttcacagtaatctggctgatcaaggaagggttcaggtgagtggtttctctgcatggcactgagctcgtcttcagcctacacatatcaactgtctgaggacaaggctgaacagcagtgactacccatgactcaagattcttctggcaggtcacaagagtgaacagcatcccaaaccaaactgcacagttgagtttaagtccaataatttctaacatagcttcacacatttcaaatatattgctttatttcagtgagtacaaatttttaagaaaatgtttactccatttaattatagaggtgtttgatcattccatggacaaataattatgttttcaacctttacaatattgaaaatatttgcaaatgtaaatttgcattaataagaaaataaagctggatgcgttttcaacatgtggctttaaatataatttatttaaatggcctcatgggggaaaatcattttaacttacataaattctcattttgtctctcttgtttcttatagagttgcccaataagaagtcctcccatgagatttggaagtccgaaaaggatgactcaatattctccattggtacctaagacagacacagggacagacatgaggactagagaaacacctgaaaagatgctgtaggaagctgagagcatcagcacccccacccctaagcttccagacaggactgaggaccatatggttagaaagcccatacttcagaggaagatgcattctgttgcctgagggaggatcagagattcctgcttctaatatcagctttcatgactactatatccttggctttgaaaggttgtagtgggaaacttaatcttaggaatttggtcattcttgtcatacccaacagagcaaagaaaccagtggggaaaggcactcagggtgcaaaatattgtttctagaatgcaattgaaataggccctattatcccatggaactaatgtttatgtttttttgtataaacatagaaattgactcccccagtcttaaaactcaagatagttacatctgtcttatctgagtttttttttgtttgtttgttttttcagtaaaccaatgaacaggcctcccagatactatcaaggagctgaaacttacatatcactgaatcgggacagtgagacatcagaaccttcacccattatgattgcctcactgacctcctgcttcctgttgaccaaattatcttccttacccctccctaattcctgttttcccacatttcttccctgctatataaactcctaatttcagttggtcagggagatacatttgagaatggtatcacatctcctaggctgcagcacctgattaaagcctgttccttggcaatgcttgttgtcttagtgattggctttctgtggggtaagctgcagagtcttcactgaatccctggcatttcagtaacaaaattctctgcaaccttcactgctttggcttattgtaacctgaaatcaaatttgtccacaacttctgagataacttgatataattctaggattcattttgtccaccactgcttaccagtctgagcttgccagctcccaacccttcctagtgccaatgaactttctcaaagagccacaggtaacattttccctttttcataaaatgctaattttctcttcgttcttccaatatcttgaagaccactgagttttcctgtatgccccacctggcaaatatttctttgcaaataaaacttaaatttagagattcatctctacattttattttgactttagtagtttactttaattctctgtattaagacaattcctgcttagaatatctatagtggcttcttctgtgttatatgaattcaagctgaagccataaactagactcctcaagtgtcatgatctctgtatttatcaaatcaggagatgcattgctatgtctgtgcagttggggctgagaaagagaaaagaattagggtgcagaggcgatttcacgtacccctctaccaacaccatcagagtgtggctgcatctgagcaacactctcagccaatggaggcatcaggaggagcagctggggcagcccagcttcacacatctgcttccctgggggtttatgttcgggttggtaacactgtgggagggaaactgttagcctgttgacaatagtaagttgcaaaatcttcaggctgcaggctgctgatggtgagagtgaaatctgtcccagatccactgccgctgaaccttgatgggaccccactttgcaaactggatgcagcatagatcaggagcttaggggctttccctggtttctgctgataccaggctaaccagctgctaataccctgactcgcccgacaagtgatggtgactctgtctcctacagatgcagacacggaagatggagactgggtcatctggatgtcgcatctggaacctgagattggaaacataaaaacaaatgtccacacaattaatcatgctgtaagagaagttccctgaatagtaaagcagtactcagcacactgaccgagtataatcctagtgttctcctttcttacctgggaaccagagcagcaggagccccaggagctgagcggggaccctcatgtccatgctgtgtcctgactgggtctgactcctgcacagggtgtgatcagcctgttaataagtcttcaggtcaggagactgtgctctgggaacatgcaaatgagcaggggatggggcaggctgggcgcagctgcagggctggctcatctcagtaactcagcaccagctcagtgtccccaggtgtcccaggtaagaccagggtagcacaaatttgtctgcagagaatgtgtttctactgggaactattttgttgtgagtaacattttttggtttctttttgacgatttgaaatattcctcaggagttgatggactaatgtatttcattggtgtatggggattatttaggagaatattgttgtttgtaggaaacacatagtaaaatgttagacggtacaattctcaagtcttcaaaagactcttatatgattccggctagggaagggggtatttgtcgtatacatgcaacatttctgtgagtttaacattgttcctatgtaaaaaaattaaaaataaaatttattgacatgatggtacatacatttgtaagtatcaggtaatggtgttatgccattgttcttaccagtatgagatcaaactatgtactatagatacacaaagatgataccgtgttttctcgatgcatgcagcagtcacagatccacaattatcaagagcgacaggtctctatagtactcagacactaaatgggttgcaccttattcttgttttgggcaccttcatagtctaccttcttttctgccattcagtattatttcccaaagttcatctctcttactgagggtgaccactgcatggagcatgtccctgccatgcaccatcaatgacactttcctcttttactttttatcagtgattggggaaatcatcctgacccaggcaacagcctccctgttaactgctttaggaaagagacactgaatctcttatcaagcagttgcctatgtacatggagaaatcacttggatccagatgaaactggacagggatttgcactcgttatatctcatatctctaatgtgcccaaaaatgtcccagcctgactcagtagcagggaaagtggatccaactacatcagcatcagtgggctgccacctaggactccacaaaattttactgatgcctgactaggggagccaaatcacagtgctgcaggctgtgcacaaaccttcctgctgttttttaagctgcctgaattttaagggaacttgcttatattgggagaaaggaagaaagctccatttgtcctctaaatatttgctgaaaatgaatggacaaaagaaagattaataagagaaaagacaaacaaaattcatttgaagtgcagcagaatatcatagcagggtgattacccagataactcaatgggatacagttgtttatatttcttttctaaggaagagggaattgagaagtgtaggcaacctggaaagaatagatgagaacagaagtgcatcctcaaaagaacaggtcatagcctgtctggataaagcatcaacttcagtctcttgtattttagattcctcttttgtgttaatattccctgatgtaaaaattctcaggaagaatttttttgacaattggtttccttctggagaatctgctattatgcagataagggacatttaggaaaagtctttttgtgcatttggtgctttctaaatgtctttggttttacataatcatcataccagtgcagcgtagtttgagatgttattttctggattcctttacttgcaacccacctgccaagatcctgttccagagagatgcagctacagattgaatgagcagttgacccttgaacaacatggaggtttgggcactgaccatgggtgcagatgaaaacctgtgtagaacttttgcatttctaactccaggcatcatcttgaaagtggagaaagcagaccttaacctgcccatgtcttgatctttaatttcccattctccagaactgtaagaaaataaatttctgttccttatgaattacatagtgacaatgaatctgttatagcagcttgaaatagaacaagagagacagcgcacaatcagtgaggacacgatgaggtgtatacataccccagcttcctcatctctcaggtggaatagcccagaggaacttagtccatgtttccacatgtggttgatctttggttatcctgagtcaggtaggttgttgatgtgtctttttccattcatcttctgttctcttcctcactttcctcctttcctcccagtgtaaatttgctgcctaaacagggatcctcattgagggtggacccaaactaagatagttaaaaaaaaaaattgttaatcttttgtaagaggggtatttctcatctgaattctgataatttctttttctttgacatgtaggaatattcaggaggcacttaatttttttttttttttttaccaatctgttttacattcaatttgtgaactgattttgtttttctgtgtgttaaaaccaaaaattaagttgtaagccaccaacctgctgaatggactcctcttttgtaaagagcacttcaaagaaatttgaaaaactaggttaggccatgactggcaggtgggtttagatgtgcctcattatactttggagttcagacacaactgaccaacattgtcattacaacagagatctttgggctgacaaaacagacgctttgtagcattaagataccatattccaacatgacagataataggccctgaagaaaatctaaatattttaccttaaaaatatttcttcatcatattctgaagtggttctgcaaagctgccagttgtgggggaaatttgcattctatagagaatctcctccccttactaagtcttttttaaagtctgacattttttaaagctctgataagcaacattcaccttgtactttatctgctactgataggattcatctacatgacaagaaccttggcttccacatccccttttctacactcaagcatttctttatgatgaattcaactctttagacagaccttaactctttcaaccagtagccagtaaggaaagctttgaattcacctatgacctggaagcccctgcttcaagctatcccacctttccaggacaaactaatgtatatcttatatgtattgatttatgtctttccctgtatttctgtgtttccctaaagtgcttaaaaccaatgtgtaatccaaccgccttgggcacatgtttacaggaccttctaaggctgtgtcacaggccataagccttatctttggcagaataaccctgtaaattgattgagacctgtctcagatactgttttgtttatactgggtcacaaaatttaaaaatcctctaaaactatctacacatcaataaatctacattagagacagtggagtgagcataccccaacagataaaactcacaagttagaggaacctgagtctaagattttgtccacctcccttgattcataaaaatacttcgtgattttttaaattttactttagagaaggacaattttggggaatatgtttatggtcggtggaatgaataatgtcccaccccaaaggatgtccatgtcctcatctctggaacccaagtgttataggagtttttaagaaattattttaggcagataggaaaaggggtccttgggaaggttttgtttcctttaaagcagctctagaaacacttcttgtctagccagaaagccctggctcttagagccaggctgggaagctttcctatgcaaatcatagccattagaaactggattcacccaaacatggtgattcccaccgttttcttccttgtcaacacatgtgcctgggaaaaacctgaaagatgctataggaagctgagagcagctgcaaccccacccttaagctttcagacaggactgaggaccacatggttagatagcccatacttcagtggcagatgcattctattttctgagggagtaccagagaatcctgcttctactgtcaacctgcctgactactatatccttggctttgaaaggttgtagtgtaaaagttaatcataggaattcggtcattcttgacatacccaacagagccaagaaaccaggagggaaaaccactcagggtgcaaaatattgtctgaagaatgcaattgaaatagaccctattatcccatggaactaatgtttatgattttttgaataaacatagaaactgactcccccagtcttaaaactcaaggtagttacatttgttaatctgagttcttttttcaggaaaccaaccatcaggcctctagatactatcaaggagctgaaagttatatatcactgaatggggacagtgagacatcagacccttcacccattatgattgcctaactgacctccagcttcctgttgactaaattatcttccttacccctctctaattcctgttttccacatttcttccctgctatataaacgcctaatttattttgtcagggagatacatttgagaatggtgtcccgtctcctcggctgcagcacctgattaaagcctgttctttgacaacacttgttgtcttagtgattggctttctgtgtggtgagccgcaggatctatactgaatccctggcatttcagtaacaaaattctctgcaagcttcactgctttggcttattgtaacctgaaagcaaatttacccacaacttctgagataacttaatataattctaggattcagtttgaccaccactgcttaccagtctgagcttgccagctcccaacccttactacagccaacaaaatttctcaaagaacaataggtaataatttcccttttaataaaactctttgctcttccaacatattgaagaccattgagttttcctgtatgccccatttggcaaaaatttcttagcaaataaaacattaaatttatctgtacattttatttagacttcaatactttagactctaattctatctattaagactattcctgcttagaatatctataatggcttcttctctgttatatgaattctaaccaaagccataaactagactcttcaggtgtcatgatctctatctttattaaatcagcagaggcattgtaatgtctgtgcagctggggctgagaaaagaaaaagaaattgggatgcagaggtgatctcatatcctcctctaccaacaccatcagagtgtggctgcatctgaggaacactctcagccaatggaggcatcaggagaagcagctggggcggcccagtctcacacatctgcttccctgggggtttatgttcgggtttgtaacactatgtgagggtaattattaaactgttgacagtaataagttgcaaaatcttcaggctgcaggctgctgatggtgagagtgaaatctgtcccagatccactgccgctgaaccttgatgggaccccactttccaaactggaggcatcatagatcaggagcttaggagctttccctggtttctgctgatatcaggctaaagcactgctaatgccctgacttgcccggcaagtgatggtgactctgtctcctacagatgcagacagggaggatggagactgggtcaactggatggcacatctggcacctgagattggaagcataaacacaaatggtccacacaattaatcatgtagtaagagaatttccctgaatagccaggctgtactgagccccctgggctgagtaaactgctagtgttctccttccttacctgggagccagagcagcagaagccccaggagctgagcggggaccctcatgtccatgctgtgtcctgagtgggtctgactcctgcaagaagtgtgaccagcctattaagaagtcttcagggcaggaggttgtgttctgggaatatgcaaatgagcagaggatgggcaggctgggcacagctgcagggctggctcatctcagtaactcagcaccagttcagtgtccccaggtgtcccaggtaagaccagggtagcacaaatttgtctccagagaatgtgtttctactgggaactattttattatgagagacattttttaggttttttttgacaatttgaaatattcctcaggagttgatggagtaatgtatttcattggtgtatggggattatttaggagaatattcttgtttgtaggaaatatataataaaatgttagacggtatgattatcaggtctccaaaagactctcatatgatcccggttagggaaggggttactttgccctatacttggaacatttctgtgattttaacattgttcctttctaaaaaaaatcaaaaataaaatttattgacatgatgctatatatacatgtcagtattcggtaatggtgttatgccattgttcttaccactataagatcaagcaatttactacagatccacagagatgatgcctatgtacatggagaaagcagtttgatccagacaaaactggaaatgatttgcaatcattatatcgcacatatctaatgtgcccaaaactgtcccagcctagctcagtagcaggggaagtggatccaactatattagcatcagtgggctgcagcctagggctccacaaaattttactgatgcctgagtaggggagccaaatcacagtgccatagcccgtgcacaaaccttcttgctgctttgtaagccgcctgaattttaagggaacttgcttatattgggagaaaggaagaaaactccatttgtcctctaaatgtttgctgaaaataaactgacaaaaggaagattaataagagaaaaggcaaacaaaattcatttaaagtgcagcaggatatcatagcagggtgattacccaaataactcaataagatccagtagttcatatttcctttccagcgaagacggaattcggaagtgtaggcaatctggagagaatagatgagaacagaagtgcatcttcaaaagaacaggtaatagcctgtctggataaagcatcagttcccagtctcttctatttttgattcctgttttgtgttaatcttccctgatataaaaattctcaggaagaagttttttgacaattggtttccttctggagaatctgctttttggcagataagcgatgtttaggagaaggctttttgtgcatttgctgctttctaaatgcctttggttttatgtaatcctcatacgaatgcagcatagtttgagatgttattttctggattcctttacttacaactcacctaccaagatcctgttccagagagatgcagctacagactgaaagagcagttgacccctgaacaatgtggaggttggggcactgaccacaggtgcagatgaaaacctgtgtagaacttttgcatttctaacttaagtactaatagcttacttttgactgctagccttaatgataaaataaatagttgattaacacttttttaagttatttatatcatatactctattattccaataaactatgctaaagaaaaaaatgtaattaagtaaattataaaaatgagaaaatatatttactacttattaagtacttgcttacaggtgacacacacagaagaaaatacaagtggatctgcaaatttcaaacccaatttattcaagggttaactgtaccaggatgaatataggagtctctatctgtattctagggctttctctttgctgtacctctgctcacttccaatggcaatatacatgtcttatgttctttacagtcttgggcagagaactctgcctgcatgcattgctgaccaaatgacctggaatgtgtatctcttaggaaagtgctatggtttcactgtgtcctccagaatccatctgttgtaaagttaattctcagtgtaatggtattgccaattggggcctattgggatgtgtttagatcatgagtgtggtgccctctagtggaatacattaatgccagtataaacagcaattgtggggctgggatctctctctcttctgcttgtctgtcatgttaagacatggccttccttcctttgaaggaccccaaactccaggcatcatcttgaaagcaaagaaagcagaccttaacctgcccatgccttgaacttaaatttcccattctccagaagtgtaagaaaataaatttgtgttctttatgaattactcagtgaaaaggaatctgttacagcagcttgaaatagaacaagagagacagctcacaatcagtgaggacaggatgaggtgtatacatacttcagcttcctcatctctcaggtggaacagcccggaggaatttagtccatgtttccacaggtggttgatcttcagttctcctgagtcaggtgggttgttgatgcgtcttttacaattcatcttctgttcccttcctcactttcctccttttctcccagcgtaaatttgctgcctaaacaggaatccttattgcaggtggacccaaactaagacagtaaaaaaaaaaaaaaaaaaaaaatcgttaatcttttgtatgaggggtatttctcatctgaattctaataatttctttttctttgacatgtaggaatattcaggaagcacttaatttttctttaccaatctatttcagattgaatttgtgcagtgattttgtttttctgtgtgttaaaaccaaaaattaagttgtaggtcaccaacctgctgaatggactcctcttttgacagaaagcacttcaaagaaatttggaaaactagattaggccatgactggcaggtttagatgtgcctcattatactctcctccctttggagttcagacacaactgaccagcattatcattacaacagagatctctggactgatgaaacagatactttttagcaataagataccatactccaatgtgacagataataggccctggagaaaataaaaatattttatcctaaaaatatttctttgacatattctgaagtggccctgcaaagctacctgttgtgggggaaaattgcattctatagagaatctcctccccttactaagtcttttccaaagagtctgacatttttttctaaggtctgataatcaacattcaccatctactttatttactacccataggattcatctacatgacaagaaccccccattttctagactcaagcatttctttatgatgaattcaactctttaggcagagcttaactctttcaaccagttgccaatcaggaaagctttgaatccacctatgacctggaaacccctgcttcaagctatcccacctttccaggacaaacttatgtgtatcttatatgtactgatttatgtctttgcctgtaatttctgtgtctcctaaagtgtataaaaccaacgtaaaatccaaccaccttaggcatatgtttgcaggacctcctaaggctgtgtcacaggccataagccatatatttggcaaaataacctgtaaattgattgagacctgcctcagatagtgttttgcttacactaggtcacaaaattttaaaatgcctaaaccgcagcagcccggcattcctccaggacctcctcccccgggatcttgcttcaagtgctggaaatctggccactggaccgaggaatgcccacagcctgggattcctcctaagccgtgtcccatctgtgcaggaccccactggaaattggactgtccaactctcctggcagccactcccagagccactggaactctggcccaaggctctctgactgactccttcccagatcttctcagcttagctgctgaagactgatgctgcccaatcgccttggaagcctcctggaccatcacagacactttgggtaactcttacagtggagagtaagtccatccccttcttaatcaatgtggagtctacccactccacattaccttcttttcaacgacctgtttcccttgccgccataactgttgtgggtattgacggccaggcttctaaatctcttaaaactccccaactctgttgcgaacttggacaacattcttttatgcactcctttttagttatccttacctgcccagtttccttattaggtcgagacgttttaacaaaactatccacttccctgactattcctgggctacagccacacctcattgccacccttttcctcacttcaaagcctcctttgcatcctcccctgtgtctccctgccttaatccacaagtatgggatacctctactccttccttggcaactgatcatgcaccccttaccatcccgttaaaacctaatcactgttaccactagagcctgttatcacccacctgttacaacatggcctcttaaagcctacaaattctccttactgagggaagagagagaccctctcatattgttttatattgttttatactcagtacctgttttaagagtaaaaatcaaggaagtgaaatcagagacaggcagcccggcgccaggcctgggcctgcctggcctaaacctagtagttaaaaatcatctcatgacttagcaaccaatgttatccatagattccaagcattgtatgaagaacattgtgaaactccctgttctgttctgtttgactctgactaccagtgcatgaagaccctgttacataacccctagattgctcaatcaatcacgaccctttcatgtaaaatctttagtgttgtgagcccttaaaatggacagaaattgtgcactcaaggagctccgattttaagacagtagcttgccgatgctcccagctgaataaagcccttccttctacaactcggtgtctgagaggttttgtccatggctcatcctgctacattacaactcccctatcctacccatccaggaaccagacaaatcttacaggttggttcaggatctttgccttattaatcaaatcgtctttcccatccaccttatagtgccaaacctctacaccctcctatcttcaatacccccttccacaactcactattttgttattgacctcaaagtcaccttctttactatccccttgtatccctcctctcagcctctttttgcctttacttggactgaccgtgacacccaccaatcccaacaactcacctggactgttctgccccaaggcttcaggaacagcccacactactttggccaggccctttctcatgatctgctttcttttcacctgtctgcctcccaccttattcaatattttgatgatcttcttctttgcagtccctcttaccaatcttcccagcaggacactaccctgcttcttcaacatctctatttaaaggggtaccgagtatccccctccaaggcacaaatttcttcccctagtgttacctatctcggtataatcctccatcagcatacacatgcccttcctgcagactgtgctcagttaatctcccagacccgaatccccaccacaaaacaacaactcctttccttcttaggcattgttggatatttccgactctggataccaggctttgctatcctaacaaaaccactttacaagctcacaaaaggtaacttaactgatcccatagaccctaagttttttgcccattgttctttttgctctctcaaaaaggccctggagacagctcccacactagcactccccaactcgtcccatgctttttccttacacacagctgaaatacaaggctgcgctgctggagtcctcacacaggagccaggcccatgacctgttgcctttctatcaaaacaacttgacctcacaattctggtgcagccctcatatttgcgtgcagcagcagctgctgctgtaatacttctggaagccctcaaaatcacaagctatgctccacttaccctctacagttctcacaaccttcaagcattaatatcctcctcacacctttcacacttactgtctgcccctcgactcctccagctctattcatcttttattgaaaccccaacagtaactattggccatgggcacgatttcaacccagcttctcagttagtaaccaacacaagtcctgaaccacgtgactgcatttccctaatacacataggatcttcctcctttcctcgtatttctattcttcgaattcaaaatccagaccacccaatcaattttcaccaggtaagctggatatgctgtcatgtcccacatctctattattgaaactgctgcacttcctccctccaccacttcccaacaagccaaactgattgctttaactcatgtgctctctctcgctaagggaatgcacattaacatttatactgactccaaatatgctttccacatcttccataaccatgctgccatctgggctaaaagaggcttccttaccacacaaacctcttccattatctatgcctccctaataaaggtcctccttaaggctgctctcctgctggccaagcctggagtcattcattgtaaaggacaccagaaacctactcatcttattgcaaaaggaaatgcctatgccgacaggacagcaaaagaaatagccaatgcctccacacccgctaatattccagctcccactccagaggaccagtatttttcttccttatctatcactaccacctactcttttgaaagcctgctctactagtcttttccaactcagggaaagtgcttcttaaatcatggaaaattcattcttcctgcctcacaagctcagtccatgctttctttccttcatgaccacttccatgtgggatacaagcctctggctcgcctcctgcagcccctcatctccttctcttcatggaaatccatccttaagacagtcacctctcaatgctcgtctaccatgccaccagcccccaaggctttctcagccctcctccttttcctacgcatcaggctcatggatttactccaacacaagattggcagattgacttcactcatatgccccatatctgtaaatttaaatatctcctggtttggattgacaccttcactgggtgggttgaggcatttcccactatctctgaaaaggctactgcagtcatttcttcccttctaacagacataattccctgatttggcctccctacttctattcaatctgacaatggtttggcttttattagtcaaatcctccaagctgtctctcaagctcttgatattcagtggaaacttcataccccctaccatcctcagtcttcaggaaaggtagaaaggagtaatggtcttttaaaaacacacctcaccaagctcagcttccaacttaaaagggactggacagtatttctaccacttgcccttctcagaagtagagcctgacttcaagatgctacagggtacagtccatttcaacttttatatggacttactttcttgcttggccccaaccttgttccagacaccagccctctggacaactatcttccagtcctccagcaggctagacaggaaattcgcccgactgctaatcttctctttcctactccagattcccagccatatgaagacaccctagctgaatgatcagttcttgttaagagtctgagccctcaaactctacagcctcgatggactggaccctacctagtcatctatagcaccccaactgctgtccatctgcaggaccctccccattgggttcaccattccagaataaagctgtgtccattggacagcaagcctgatctctcctcttcctcctggaagttgcaagtactctccactacttcccttaaactcactcacatttctgaaaacagtaataacccttatgaacctaatatgttccttcattctattaggtctattcatccttactctactttttgcaacagggctttacacagtcacccccactacttggactgtgccccaaaacttgtcatccctactatcttctgtctagtcatactcctattcaccattctcaactactcataaatgccctgctcttgtttatactgctggtttacactgtttctccaaaccatcacagctgatatctcctggccctattgccaaaccaccactcttgacttcctcttggagtggatagatgatctttgctggcagggcacactccaatattttcaccatgatgaagtcctattctttatttttatactcactcttattctcattcccattcttatgccaccctctccctctccccaactatctccactacactatcagtctcactcactctctccaagccatttctaatccctccttagcgaacaattgctggctttgcatttccctttcttcctgcgcttacaaagctgtccctgccttacatacctactgggcaacatctcctgtctccgtacatctccgaacttcctttaacagccctcacctttaccctcctgaagaacttctttactttctagacaggtccagcaagacctccccagacatttcacatcagaaagctgctgcccttcttcgcacttacttaaaaaacctttctccttatatcaactctactccccccatatttagacccctcacaacacaagctgctattcctgtggctgctcctttatgtatctctcggcaaagacccactggaattcccctgggtaaccttgcatcttctcgatgttccttcactcttgatctccaaagcccagctacacataccactgaaacaattgtggctttccagctccatattacagataagccctctatcagtactgacaaacttaaaaacattagcagttattattgcttaggaagacattaccctgtatttcactccatcctttgctgccttccccttgctcttcagactctcctcccaggccctcttcttgtttgcttatacccagccccgtaaataacagtgaaaggttgctcatagacactcgacactttctcttacaccatgaaaatcgaaccttcccctctatgcggttaccccatcagtccccattacaacctctgatggctgccgcgctagctggatccctaggagtctgggtacaatacacctcttttagtactccttctcatcttttcactttgcagctccggtattgccttgcacaaggtctcttcttcctctgtggattctctacctacatgtgtctatctgctaattggacaggcacatgcacactagttttcctaagtccctagattcaatttgcaaatgggaccaaacagcttcctgttcccctcatgaaaccgacacgataaaaaagtgttattccactaattcccttacttgtcagtttaggaatttctgcctccactattgctctcggaactggaatagcaggcatttcaacctctgtcacaaccttccttagcctttctaatgacttctctgctagcatcacagacatatcacaaactttatcagtcgtccaggcccaggttgaatctttagctgtggttgtcctccaaaactgccaaggcctcgacttactgctgaaaaaggaggactctgtgtatttttaaatgaagagtattgtttttacctaaatcaatctggcctggtatatgacaacataaaaaaactcaaggatagagcccaaaaactcaccaaccaagcaaataattatgctgaacctccttgggcactctctaattggatgtcctgggtcctcccaattcttagtcctttaatacctgtttttctccttctcttattcagaccttgtgtcttccgtttagtttctcaattcatacaaaaccgcatccagaccatcaccaatcattctatatggcaaatgctccttataacaaccccacaataccaccctttacccgaaaatctttcttcagtttaatatcttctacactatgttcccatgccacccctaatcccactcgaagcagccctgagaaacaatgcccattctctctccataccaccaccaaaaatttttgccaccccaacacttcaccagtattttgttttttcttattaatataagaagataggaatgtcaggtctctgagcccaagttaagccatcatatcccctgtgacctgcatgtatgcatccagatgacctgaagcaactgaagaacaacaaaagaagtgaaaatagccagttcctgccttaaccgatgatattccaccattgtgatttgttcctgccccaccctaactgatcaattaaccttgtgacattccttctcctggaaaatgaatctcaggagctcccccacaaagcaccttgtgacccctgaccctgcccacaagagaacaaccccctttaactgtaattttccactaccctacccaaatcctataaaactgccccaccactatctccctttgctgactccttattcggactcagtcagcctgcacacaggtgattaaaaagctttattgttcacacaaagcctgcttggttgtctcttcacacacacatgtgtgacagattacagccctactgacaccttaacattagctcagtgagacttctgacacggggtactatattttatttgtgtgaagccaataagactgtggtgatttaaacagcagcattggaaactaatgcaaggggaagagatgtctttcacctcactgagagcatggttgtcctctgttcttggaaatatttccaccttgttatctggtgtcaattatgacatattttctagtatttaaagaaaagatctgctgccctaaaatcctatgtccagtaaaattattatttagaaatgaaggacaaattgagaagtcctcagttgtagaaaaactaagagtatttgctgccagcagatccactttaaacataggcaaaatgagccctaggaagataaaactaaagataaagagaggatgttaaataatgttagggacaaaaggctacaaaaatgagaagatagatggatataatgcattgctaaatcatgtgtgatagttgtatcaaagttgtaatactgttttgttcctaatatatgcagataaattacttttaaaaaacaatctatttacaatgggggaggaaacatgacataaaaaaggtaaaattctatatttattttaaatggtaatatattgatgccaacatactgtgagaagctatgcatataaaggaaataccatgacaaccaatttgaaaatcattataaaaagagataccccaaaattaggtaaaattaaaatgaaattgtgaagatgttcaagtaacccaaaagaaggcagcaaaaagaaaacagagaagcaaaaaaagatatagcaaaaaagtagagtgcagacttaaattttaatatatcaatatcaatatattaaatatgcaaattatgaaactttgaaaaagacaacaattgatgaataaaaagaaatgtcccaactgtatgttatctacaagacactcacatcaaatataacagtataagtagattgaatataaaaggaaggaaaatggtatactatgcaaacattaataaaaagaatcagtagcaaatactaatatcagataaagtagactacagagccaaagaatgttaccaggggcagaaaggtacattacataatgaagaaagtcattttggaaagaagacagagcagttctaagtgcgtagacaccaagcaacagagcgatatagtgcatgtggcagaaactaacaaaacaattgcacacagagacttcaaaaacccctttttaatcttcgataggacaactggacagaaaatcagcaaggatttaggactcaacaatatcatcaacccacgagatctaactgacatttatagaacactccaacccataacaatagaagttcacatttttttcttccaagtgcccacaacatataccaagataggacatatcctgcccacataacctctcaacatatttgcaataattaaaatcacagtgaatgtgttctctgaccatggagggatcaaactagaaatcaatattgaaaatgtaacccccaaattttcaaatatatgggaactatacaatattgttctttccaaagaaccagcctttggcttgcctggtgttcagtgtcactttttctgtttgcagttttattgatttctgccctaatatttattatttattttgctcatgttctacttcagatataaattgctcctctttatgtagtttcataaggtggaagctgagattattggttttatcccttttattttctgaaaaatactcatatgcatatgtttatctacgtgcatacacatgcataaatatgtgcagatgcatatgcatacacgtggttttaataccataaattaccctgtaagtgctgctgaatacctatgcgtattttcttttctctgagctcaaactccactcacttgcaaacctgcccacttaatctgcatgttcattggtgtctcaatctagaattgagcaaaaataacaaactcctttcattttatctcaactttcttgaccgctaatacatttaacatcagtaagtcagaatctatctaatagattaaggccaaagctgccaggtcactcctaatctgactcttctcacaccaaggagtgtaaatgacattgatttaaaaatatggtatcatctgcctatgtctccaacaatcttcactgccccaaaactagtttatgccaggatccactttgcccagataagcatctcttctgcttctcacagcccaattcgagtcattactttgctaaaaaataaatatgaccatgggggtactttggttaaaaaaattcccagaatgtcctgctgtacttacaaagcatttgctccccaaacagaaaatgaaggccttattaatttcacatcagtcacatgtggtgatctttaagacactgagagaaaatggctctgacctgccccctcacgaactttctcttttttacctcggttggttaagtcactctcctcatagtgcctttctctgtccttcacacgttcatactgtattccttctaagcgccttgattgtcatgaacctcagtgcccttcagaaacttctcttcaggtcagttgttctcctcatccaggtcagtcacctcctcagaaaaagtagcctctacctccctaactaactgactccttttcctcattaaccacttcctcttcccttgccatttttttcctttatgacccttaactttttctagaatctttttgttgatttatgtttaattagacatggcctttttttcaccagaaaagatataggtaaatgagagtcagacactgactttctcaggggtgcagcctagatacgttcctggtccagcatagttgctcaattaacactttattgaatgaatgaataatgaaaagttagtaagaaactctccaagacataatcaacactcataacctatacacgttgaaaacaacccactgaatgtaaaacatggattattctgagtaatgagaagtttgaatagcagtgtgctgctcttcatagtcagctcttcatagtcagtgtgctgctcttcatagtttgtattttgctggggagataaggaagacatccaaagtccatgataatcaggtaagagtattcttatcttttttaaaaaacaagcaaatagactttgcagtcacaaaaaaattgcaataaatgggactacactatcacttaactctattggctcctgttcacaaaaacaggttgtattattaactcttctttgaaaacaaaccagctccaaacaaaatgccataaaatgagtatgtgcagtcctccctcagtatccatgggaaatagtttccagggcaccctgcagatattccaatttttggagactcaaaacctttatgtaaaatgcacaatatttgcatataacctacacatatcctcccgtacatttcacaccatctctagcctccttatagtacctagtacgatgtctacacatgacttaacttgtgtagattcatccaagtgttactcagcacatggcaaagtcaagctttgctttttggaattttgtggatttttttttcaaaatatttttgatccaggattagttgaatccatggatgcagttcccatggatagagagctgactgtacagctccttataattctgagggtcagctctgtggttcttccattctgggctggctggactgatctctgctgagtccgctcttgtgtctgcagttaccctgtggttcatttgcgactggatggtctgatgtgacttctttaacctatctggaagctggtttgatgtgcaggttggacaacttttggtatcggtttacatgggtcaggaagatgggtcctattccccaatctgtattaggtttgttcccagatcaactctggggttcaagtctattcattgtgggttgtttgggagaaattctacatgaacaaagctgaactgctgtcatttattgctgttagcagttattgttatcctctgaaatgcatcttatataaccaagatctccccagggtggcccaacagtacagctcagctcagcccatcctgtcacttcgctggatgactgcaggtgtgagaaaggcaatatgctcagtcacaggaaaggcaggggcccaccctggggctgaaacctgcagacacagcgttcacacagcttctttgcaaaatacgaagacttcattttctttatacttaagatagttatacatttttttctataatgtccctatgctatttaactatttttaattttcagaactggttgtatttattatttctgtgttaggtgctcttagtcacttatggcaagagtgagttaatagagacaacatacagagtagccatggaacaatagagaagtgtgtgtattcagacaggataaagatcaaaggggtgacaaatacattcttttgagaagcagattctcatagatcaccacaagtcaaggtccacattcaaggtgcagtggcgtgtcagtcacattgtgcaaatggtcagctctgcacattaaacttggctagcacattgcaggaccaaaattacctgtaaaggtatggggaaaataaaccatcatggaaataacaatttgaaggagttctcaattatttatacttggatataaagcagaacgctacaatgaatgaacctacaacctaaaacctttaagccttttaaagaggtttctttttgtcagggtatttctcagcaaataatgataaaaaatttatggataaactacttgcacaattagccacaataaatcccttccctgtactcatcctttggttggcctcattctaaatggatgcaggtgttgcccatgtgtcttgctcaggccaataggataatagcagatgtgacacaagtggagtcttggaaagggcttgcacatcgaagctttcctctctctcacagtgcttggaaaccctaaggtcacaatgagaataagcctgtgcccatctacagtcaatgtcagtggcatggctgctcttcggtctactatttgttcttaaaatgtgtgctaagtttgttatggccatgtaacaaattaccacaaatttatcagcttaagactacacccatttatcatctctcaatttctgagtcagcagttggcacatggctttgtcgggtcctggccattggatttcacaagactgtgccacagtgtagattgggcttcattctcacctgtgagtcccctgagaacatagatactttagagctctttcaggtagttgcagagctcattccttagcatttctatgactcagggcttcaatttctaactggctcttggctcaaggctgctcttaggtccaagaggctgtggacaattccctgccatgtgatgctcacacaggcaatgcccacatggctggttgcttgttcatggtcagcagaaggtttcagagagtgtctctttccagtctgctatgacagaggcttatagaatacaatcattggaaagacatctcataacctatgacatatcatatggattagaagcaagtctaggttccgcttgctctctgtggaggtagattatacaattgtgtgattcactggggagagggttctgctagggtgttctggcatctttagtttcctcaaatatcaggtacttgtactgagtgtgaaatctgtcctgtacttactggcattgactagtcctgtgacccctgggaacatcttgggaagcatactttgtaagagaggttttagggtaacctagctattggaagcataacatttgcaaaatatcctaatctttgtgatttctaacatgtcctcaaggttccttaattgcaattatcataagccaattatctctaaatatccgcaaaatttatatttaatagtaggaaaatgatttattaaggagtctattaaacaagactcagggaaatgatgtcaacacccaattgctgctgcccactgctagactatgtgagacaattttcatgaacaatagaacagatactgcatgctagacacttctgtgagcaccactggcctgctacctctagaaatgtttgcagaacaagggcaattgctatgagtctcaaaatatatatttttttattatactttaagttctagggtacaagtgcacaacgtgcaggcttgatacatagggatatatgtgccatgttggtttgctgcacccatcaactcatcatttacattaggtatttctcctaatgctatccctcccactgcccccgaccccatgacaggccccagtgtgtgatgttcctcaccctgtgtccaaatgttctcgttgttcaattcccacctatgagtgagaacatgaggtgtttggtttcttttccttgtgataggttactgagaatgatggtttccagctttatccatgtccctgcaaaggacatgaaatcatcctttttatggctgcatagtattccttggtgtatatgtgccacattttcttaatccattatatcattgatggacatttgggttggttccaagtcttgctattgtgaatagtggcatgataaacatatgtgtgcatagtaccatgatttataattctttgggtaggtacccagtaatgggattgctgggtcaagtggtatttccagttcttgatccttaaggaattgccacactgtcttccacaatggttgaactaatttacactcccaccaccagtgtaaaagctttcctatttttccacatcctcgccagcatctattgtttcctgacttcttaatgattgctattctaactgacgtgagatgatatctcactgtggttttgatttgcatttctcttatgaccagtgatgatgagcatttttcatgtgtctgttggctgcataaatgtcttcttttgagacgtgtctgttcacatcctttgcccaatttttgagggggttgtttggtttttttcttgtaaatttgtttgagttctttgtagattctggatattagccctttgtcagataggtagattggaaaaattttctcctattctgtagattacctgttcactctgatggtagtttcttttgtcatgcagaagctctttagtttaattagatcccatttgtctatgttggcttttgttgccattgctttggtgttttagtcatgaagtccttgcccatgcctacgtcctgaatggtattgcctaggtgttcttctagggtttttatggttttagatctaacatttaagtctttaatccattttgaattaaattttgtataaggtgtaagtaagggatccagtttcagctttctacatatggctagccagtttttccagcacgatttattaaatagggaatacttccccatttcttgtttttgtcaggtttgtcaaagatcagatggctgtagatgtgtggtgttaattctgaggcctctgttctgttccactggtttgaatctctgttttggtaccagtaccatgctgttttggttactgtagccttgtagtatagtttgaagtcaggtagtgtgatacctccagctttgtttttttttgcttaggattgtcttggcaatgcgggctcttttttgattccatatgaactttaaagtagttttttccaattctgtgaagaaagttattggtagcttgatggggatggcattgaatctataaattaccttgggcagtatggccattttcactatattgattcttcctatccatgagcacggaatgttcttctatgtgttttgtgtcctcttttacttcgttgagcagtggcttgtagttctccttgaagaggtccttcacctcccttgtaagttggattcctaggtattttattcactttgacttaatctgtgaagtgtatttaaattctcattctagagaagaaaaatccaaagtacttggaaaagagaaatcttgccatgagatacacagttcttcagtttcaaagcagagattatctctcagatattctggctcatacaattttcagtacactgcaagacagaagatgtgaagacaacactacccaattggccttacacttgctttgctcactgttaactaagttcactgtaaaaaaaaaaaaaaagattacaataaaacacattgtcaatgaactgtcacaaataaatacatctttagaaccacatccaaaatccagacatagaacatttctatagctccaaaacattttgacccactcttttggaatcaacttgctttctgcctcacagatcagggaattttgatctgcttcctgtcagtacagatttcattttccttgtaagagtttcacataaatgaaacataggatgcgctcttttgtgtctggtgacttttgtgcagcatgactctttctcagattcattcagatgtcctgtgttctaattatgtgctcctctttatttttgagtattatttaactgttcagtaattttatgatggatcccttcatctattgattgccgtgtgggttgtttccattttgggctattatggataaagttgctgtgaatgttcttgaacaagactttgcatgaacatatgtcttcatttcttttgggctaataccaaggcgtgtagttgctgtgtttatcagtaagtgtttaatactctgtccgactttaccgaaagtggctataatattttatatgtccaccaataacttattatagctccacaccctccaaaatatttcaattttttttttaagatttcacctaattgtcactcaacagtaaccagaatagctagtgattattaagctatgtttttcttcccattttcttgtcaatttggggaattgatgtgttacaggacattgagaacagaatcaatactgtcctagttccctatcaaacacttttatcaagccataatatttaggatggtaacatgatatataaagggagtgttggagtagtaataagtattttcaatacttattatattccataaagcaatatatcttcaatgaaatggcatttaactagacttagcatagtaaggttctcatctcaaccctagtattcagtattagcaaaagtttgaggaaaaaaaatatccagcaacataagccagagagtgttttgctagtcaagtagcactgcaatactgatgctcttctaatgccagcccttcacaataatttccactcagaacatttggttgcctccttgccttgttctccttatgggacttcatgctgagggcatgtggcatcacagagggagcagtgcacttgggtgcagaaatatagcttagtagattgtctggccttagaggtggctgcaatggaatacacattttcaaggaagttccctgttaaacctcctggtaaactgatagttaagaccaggtgcggggacttatccccgttatcctagatgtttgcaagatcaagtagggagggtagcagaaatctaggagttcaagaccagcttggaaaacacagggagactccctcatctctagaaaaaaaacactgtttgttaagatgtggtgtgaacaatggcatctctaagtgattatttattaacatttgctgagaaaattagaaaatagaacgatgccttctgatccaataatatcataataaagatgtgaagtttttaaactatggtaagtatagagaacataaaattgcccatcttagccattttcaagtgtacaggacaatggcattaagtatagtcacattgttgggctagcatcaataatatccatctccagaactctttccatcttctagaactgaaactccatagccattaaatgacaaccccctccccgtttcccctgctcccagtccctggcaacctgtaatcaagttctgtctctatgacagtgactgctgtgaagcaggtttgctgtgccctggttaccaacctgtcagagtccagggagacagaacaatcatacacaacaagttacaagaatctagtttagtatttacaggtgaccagcaaggcacggcagaagctgaggatttattgtgggtctttaccctgaggcacaggtaagtggggctgatggaatcttgactgtgtgtacccctcttggaccagagctaaggaaccccagaaagaagatgctctgggttttaaaccctggtgtcacaggacacatggagctaaagtactggaggacttaagtacaggaggacagtactagagggagctggatcagaagccagtctgttctgacctgtccctcgctatttcagaatgttacatttccagcacattctacaattattattgagaagtgtaagaaagagagtggggaaaatcaagtgagtccaggaccatcagaggactggagtgaagtcgtcccccaacacagacatcctccgtagaaagctattccattttatacgcctaccaaccaccgtgaactggaggcacaggtgtgtcttgtcagacggatgaagcaccttgactgacacaatctcaaagcaacatcattgagacagagccagaaaagatttcactgggccaatgaaaactactaccagaggcagaatgatcaggcccacctgaagcagttatgtagcccaggatcccatgatccacagaagaagttgctaaaggggtgaaagaagaatccttcaggtgggattttctgaatctgcagaatccattttctgcaattatgagcttgtttccagatctcctctacttgaatttctaggatacctgaggtgtttatccaggtatagcagggggtattggaaattgtatacattcctcccagttgggattttttaaaggtctagagcaacactgttatcttaaacatccatcccgatggagttaagggatgtctgctgggttaccaaggcagtggctatggaggaggagcaatatctgccatggtcagggacaagttccttatcatttcactttttttcatgagcactgactcctatacatagtaccaaaaatatcataaaagacataaacctatcatctgttgtaccttctggtaggtccctagtaagtctgaggtacagctttgggcttcaggctctatgatttacctaattccaaggagcaatatccagagacaaccccagcatgcccaacatgcaggatctcactattccacagatatccagagatggcatcacatatcctgcattttggtcactcccaaaccgcttacagagaaagatgtagcccttgggtgcatacagccccccttttcccatttttcttcaatcactctgtcatggttatgctggtattggtgcgttcattagccaagtctcactgatagtagagttgcatgagcaaagttttgctcatacaatattgtctgtagacagagggctagcattagtccagtccttgtttttatcattgccattgggatgtttctcatctatgcaatcaaaaaagtatggtgcatcaaaatattagtccaccaatgttttttttaattgtggtcatgacattcgccagaggcaattaagttaaacaggggtcctccagtttcctcccatgtggcaggtgtcagattctcactttgtgggccagtgcttgggtccttttgatgtacaccttagtattaggaatgttggtgtaatttacccttggtagaatgaaagggaacctctagttaatgacagaatgaggtcaagaatgggagattcactattttgaaagatcaccctggtgacctaaaagaagctaacaaagacattgtgcttctaggcctttgctgcctcattcttgtcaaaatgcagcctcacaggttaatgcatcgtctctcacccatcccagggtctcaggtgtcccctacccatctacaagggttgggccgtgttggtgtaggaatgcggtctggctgtccttgctctgtgaacaatccattgcctttgtcacttgatccagatatttcagtcctgattgtccactccaggaagggagattctgccctgtaaaaactggacatatttcataatatcaccaacactaaagggaggataagatgtccctggcaccagaagagggcccctagctccgtgatatttcttagtcttgttatccatcactgtgggatcttgtagaaaggaagcacccagaggaaacataatcctcctattagagttagggggcctgtctggggcattgtaatggcctagattgcaaaccaccccagagcatgtattctaaaggaaaaaaagaaaaggaatggttaggaacactgaaatagctttcacaggtccagactaatataagtgtctgcctggcctacctttacttccacccagctctgtgtttctcaacatgcactatttccctttttgtggcccaggatctttaatgtacatatttctctagtcagatgggataccaccccattaacagactttgtagatgtcctttctgcatattgctgtgtgattccactgatctagcattcactaggatcattggcctgtggatgcagggtgcatggaaagttcatcgtgttccatgagagtgtgcctattgtcacgttgcttgggcagtgaaagatgctcctttgtgagtgagaagtctcatggagtatccaaaaatatgacataaattgcactcaagggttacctaggtagtcccagcatcaaattcagcatcatatttctttttcctgcaggtggaaagctgtggccatagtcctttccttcacactggggattctttaatagtccagtctctcagttgccattttcctgaacagatggcaaggctgttgacaatggccgaggatttagtggatatgtggcatggtgcgttgttgggacagcctgcatggccattaccactgaatgtagttttgcccactgggtagaaagcccatgttaagtttcagttaaaaaagtggccatccactggctgaatggtggccacacctagtggatctgtcagttagcattttgctcagccttcagtgactcctgccatatggaaatctctgaatcttgggctccacatgggcaaataaagagccaaattatcacctacaagttatttggtcccttctagcaagctccccatttgttcatggagccacagatcctgtggggtcctgactaaacctgatcaagaatgtgccatttccatttgataacatggctctgttcagattgttcagttttactaatggtgtttgtaagtatctaagtgagaatggacagctaagggaccagtgtcacagtcacacatggtgctgaagccttaacatgttcagtctccatcagtgcctaatagcaagcaaggagttgccattcaatataaacacattcagtggctgattcaggcaacttatgtgtcctaagattgagaggctggtgcactcattgatagttttctgttgctatacgctccactgagtatgcatagaggttgtggatacctggacttccatctggttagcaggctgtaaaaatcttagagaagtgactgggccaggccttgttgaacagattccaaggctactgttgcaaaacgcctttttcaaagttggcaactttgttcatgattttgactaagggaaccaaaagaacacccaggtgaggtttatgccgtctcccattcgcaaaggggcctacctgccactgagtctccttttattcagtgggtgccacagcgaccaatgtttccagctgttcagttggcataataattaactatgagtacacagctcactttcactatacatatattccttgatggaagttacagcatcatacatgattagcgtgtcagaaccttcaccacatctgatagggtatcaattcaattacctagggtttgtgtgtcagttttgcttgactaagaatatgttttctcctttctatagagacggctgcacctgtgcaggtgataagatcatgaactgcaccctttgccttacttttttgttgtaaataatttgcccgattcaatgccatattatggaagaatttcttaactgtgatgaaagcacttggaaaatcctcaaataatatttcatgcagaaatataactgaaagaaagacaaatgcatatacaggaaaacaactgctgctcttctcatgttggatgaggcctgctaaaaacacctgacaccagctgttagtctgatccttgatgtctggtacaatcttgggttattctccttggaaaagtggatgctcagaagtgccagtatccccatgagtcccagttaactgaaattcatattgttaagcccatgcatggatagtcatgacatcagttcatgagattccctgggaaagctgggaaaggtaactgatgaagtccatgttttgaattattttaattattttgagctcctgcttctaatggcctttagataaatattcacttggaaaggatttattttttctactggtccttttttggaaggtccagtcatatctcctccagagtgactttgtgtccaatccttcagatgtgtttcttctaaggcctgatgatctgtcaaaaccactagtcaagatagtgatattgttggtaatatccagagcggggagaggacaatagtactcccaatattgcgggaggtgtacacccctctttgtgttattgttcttaatatccagggggaaaacaggatgacgttactaccaatatcgtggggggtttacaccctcccttgtgagattcttcataatatccggcaggggggtggataggactatattattcccaatatcgtggggggtgtacacccctcttgtgatattattcataatatcctggggggagacgacaatattactcccaatatcgtggggggtgtacaccccttattttgatattgttcgtaatatccagggttggagaggacgccattacccccagtattgtggggagtgtacaacccccttgtgatattgttcgtaatatccagggagagaggaagatattactcccaatatcgtggggagtgtacacccccaacttgtgatattgttcataatatccaggaggggagaggacgatattactcccaatatcgcccgggctgtacacgcccccttgtgatattgttcgtaatatccgtgggggaagggaagatggtattacttccaaaatcgtaaacacattgtgtgtacacccccctgtgatattgttcgtaatattcggggtgggggggagaggatgacgttactttaaatatcgtaaacacgttgtgtgtacacccccccaccccacgatattgttcataatatccagggagagagaggagatgatattactttcgatatcgtaaacacgttgtgtgtacacccccctgtgatattgttcgtaatatccgggagaggagagtatgatattactcccagtatcacggagggtgtacaccccccgtgatattgttcataatgtccagtgggggagaggagatgtattactttcaatatcgtaagcaacttgtgtgtacaccctcctttggtattgtccataatatccagggtgggagaggatgatattactggcaatatctcggtggctttacacacccctgtaatattgttcgttaaggagttaagaggatgatattactcccagtatcgcgggggagtgcacgcctctgtgatattgttcataacatcttgggagagacaggaggaaattactcccaacatcgcggggcatgcacagccccctgtgatactgttcgcaatatccagcggggaataggatgacattactcccaatattgccggggatgttcaccccactgtaatatttttcttaatattcaggggggaaggatgatattaatcataacactgcggggggtgtacacccttctgtgatattgttcattgtatccagggatggttggagatgatattactttcaatatcgtaaacaccttgtgtgtacacccccctgtgatattgttcctaatatccagtgggggaaaggataatattactcccaacatctcgggaagtgtacacgtccctgtgatatttttcataatatccaggggggcagaggatgatattactcccaattttgcggggggtgtacaacccactgtgatattgtcgtaatatgaagtgggagagaggatgatgttactcccaatatcgccgggagtgtacacccccctgtgatattgtttgtaatatccagggggggattggaggtgatgttagtttcaatatcgttgacaccttgtgtgtacacccgcctgtgatattgttcgtaatattcagagggggagaggatgataatactcccaatattgcggggagtgtacaccaccatgtgatattgttcataatatccagagaggggagaggatgatattatgcccaatatcgtggggggtgtgccccccctgtgatattcttggtaataatcggggggagatgacattacttccaatattgtggggaatgtacacccccttttgatattgtttgtaacatttggaggggagaggatgatattactcccaatatagtggggggtgtaaaatccccctgtgatattgtttttaatatccggggggatttgagatgatattactttaaacatcgtaaacaccttttgtgtacacccccctgtaatatcgttcataatatccaggtggggagaggatgatattacgcccaataccacggggttgtacatacccctgtgacattgttcctaatatccaggggaggaggggttgatattattcccaatatctcagggagtgtacacctccctgtgatattgttcataatatccaggggtgattggagatgatattactttcaatatcataaactttttgtgtatacacgcccctgtcctattgtttgtaatatccaggaggggagagtatgatattactcccaatattgtggggggtgtacaccctcttgtgacattttttgtaatatctgggagggagaggatgatcttactcctagtattgcaggtggcgtactccctgccatgatattgtttgtaatacacagggctgccaggatgatattactcccaatatcttggcattgtaccctggcccagcatgatgttgttgttcgtaatacccaggcagggagaggatgatataactcctaatatcacatgcagtgtaccccctctgtaatattgtttgtaataccctgtggtggagaagataatattattctccatatcaggggtgatttactcctcttttgtgatattgttcctagtaccctgtggtggagaggatgaaattgctcccaatatcaccaccgatgtgacattgttcataatactcagggcaagtctttcctgtgtttgtcccatgatagggaataagtctcttgagatctgatggttttatgaagaggagttctgcacaagctctctctctttgccttttgccatccacgtaagttgtgtcttgctactttttgccttctgccatggccgtgaggcctccccagccatatggaagtgtaacttaattaaacctcttttttttggtaaattgcccagtctcggatatgtctttattagaagcatgaaaatgggcaaatacagtcaattggcaccaggagagtgggccgctattgaaaagatacccaaaaatgtggaaatgactttggagctgggtaacaggcagaggttggaacagtttggagggctcagaagaagacaggaaaatgtgggaaagtttgaaactccctaaagagttgttaaatggctttgaccaaaatgctgataatgatatggacaatgaaatccaggctgaggtggtctcagatgaagatgaggaacttgttgggagctggagcaaaggttattcttgttatgttttagcaaagagattggtgacattttgctcctgccctacagattggtggaactttgaatttgagagagatgatttagggtatctggtgggagaaagttctaagcagcaaagcattcaagaaatgactcaggtgcttttaaaggcattcagttacataagataagcagagcataaatgtccagacaatttgcagcctgccaatgtgatagaaaaggaaatcccatttctgaggagaaattcaggccagcagcagaaatttaaaaaagtaatgaggagcccaatgttgttaatcctcaagacaatggggaaaatgtctccagggcatgtcagaggtcttcatggctgcccctcccatcacaggcccagaggcctgggaggaaaaagtggttttgtgatccaggcccagggccttcatgctgtgtgcagactaaggacttgttggcctgtgtcccagctcttccagccatggccaaaaggggccaatgtagagctcaggctgtggcttcagaggccccaagccttggcagcttccacgtggtattgagcctgcaggtgcacagaagtcaagaattggggttgggaaaccttcgcctagatttcagaggatgtatggaaacacctggatgcccaggcaagaagtttgctgcaggggtggggtgccatggagcactgctagggcagtgccgaagggaaatgtggggttggagccaccacactgagcccctactggggcactgcttagtggagctgtgagaagaggggcactgtcctccagatcccagaatggtagatccactgacaacttacaccgttcacctggaaaagccacagatgctcaacgccagcccttgcaagcagccaggagggaggctgtactctgcaaacctacagggacagagttagtcaagtccacagaaactcacttcttgaatcagtgcgacctggatatgagacatggagtcaaaggagaccattttggaactttaggtttaactgccctcctggatttcagacttgtctggggtctgtagtccctttgttttggccaatttctcccatttggaacagctgtattaacccaatgcctgtacccacaattgggcctaggaagtaactatcattcttttggtcttacaggctcataggttgaagggtcttaccttgtctcagataagactttggactgtgaacttttgagttaatgttgagatgagttgagactatgggggactgctggaaaggcatgattggttttgaaatgtgaggacatgatatttgtgaggggccaggggcagagtgatatggtttggctgtgtccccaaccaaatcccatcttgaattctcacaggttgtgggaggtacccggtggttggtaattgaatcaggagggcaggtcttctctatgctgttcttatgatagtgagtaagtctcatgagatctgatggttttataaagaggagttcccctgcacaagctctctctctttgcctgccaccatccacgttaagatgtgacttgctcctccttctgccatggttgagaggcccccccagcttatggaatcgtaagtccattaaacctctttttttgtaaatttcccagtctcaggtatgtctgtttcagcagggtgaaaacagactaatacaggattcagacagatttagaattttaatggcttcttgatggatttaccaatttataattataaaatgtccattttatctcttgcgttaaagtcatgacctagtttctgttgctcagttttacatgatatgtacttttcatcctttcattttcaaagccattctatattcttactatagtgtgtatttaatgattaacatacatctttgattttaatcctgtctgataattttatgatttacttggaaaaatttgtttatttacgatgcaattattgtaaagttagggttaaacctaccgtcttgtttcctctgattttcttgattcatgctttcatttgaattagtttaattatagattttttcttatattaacttgctaaatatgcaagattattatacagaagatatcctcaacttattaatgcctaatacacatatagtgtattaaaatttctctctcaaattatttctaggtaagtgacacaagcagaatcaaccttcggaagatcatctatttcctgctgggttgacctggaatgtgtgatatgacctaaggtaacctttgagtcaccacacagacctagagctctgtgtgatgcagcacttcctcaggagcttgcagtggcatcagggcccagccttgaatgccaggcaggggtctctcgactctgtgattcttcccaggaaatacataagaacttgcatctgggttcatatctcaaacgcaacccaccagtctctcacgtactgacctctgctccaagtcttcagatggttatttttcatggggtaaaaatatggcttacatattatcttgtaattctgtttaagatggcatacttatgttcctttattctttcaaacttggtccttattgttgaaacccagctttggagttcagaaaactactttttacttcaacatgctgtggttgagactgtggaaagacttttggcactaggtctttatttttgcatacatttgcagcaacatatctagtaacttaaaaatctagaccgtgaagagttatattttggtactccctgaaaaaagtaggaaaaaatacagtgcctgctggtgtcctggtcaggggtctgccttcggaaaagtggtggggggaggtggaggaggggagggaaactgttttaatattaccaaaccttatcaacatacatatactctagtaactgctaaaccaaatcaaaagaatgtattagttttgcgttgccagtaatcagtctcaattaggtgcctgttacgcagaacgaatttacttgatgaatgaatgtagggaaggaagagaggcttagaatgagctttcattgagctttctcttctctcgtgtctcattgctcaaaggggaggtgtacctcctcctttttgcagactctgtcatgcaaaggccgctgcagctgatgggaacttaaaatgtggtgcctgaggtgtagctgagaaatttatggtcatgagccctcagctgtaccaagtcctctgagttctccaacatcttggtctttaggcatctaagagaatccacagtgcctgctctccacagaaacaacacatctgggcagctaggccacagcaagcagggaggtttgtgttcaggactgtaccattgtgggagaataatgtgtactttgctggcagcaataaaccccaacatcctcagcatccatcctccttattttaaacatgaaatctgtccccgacccactgccactgaacctgtctgggactccagggtccctgttggaaaccaaatcaatcaggagccgtggaggctggcctggcttctgtaggtcccaattcaaataggtgtatccattactgtgaaaggggctatgactggatctacaggagatagaggctggctttccaggggtgacgggcagggagagtagaggctgggtcacacagcatctccattggatcctgaaataataagagagaagtgcaaggttatgtacaaacattgtgagccattttaataattttctgtctgttatttatgttttgctcaattattttttgtgtatgattttggttaatactcccaaaacatacaggtttaaaaagaaccaagatttgcaaagcacaaataagcctctagaagtcacctatcccatccccctctttctgtgtcacagctttcactaaagtacatgtccttgctccttctggaatcttcctcactctcacagatctagacatcacatgccccatcctggaggacaagacacatctaacacgaggacagaacacacatgggaggtggcagggcccacagagttcaccctcccaccccatcatcctccctcatttcccttctgctctcagcagggacccagtgcattagcagccctgggagctgagcagggagcctcactgtgggaaggtgaactgaggagtcctgatcagtcaaggcaaggttagagctgagcttttatctcagactcacaagggaaggtcttccctaggggacagtatgcaaatcccctggtgggtgcagtggggtggaaagagccaaggagaaggtggggacctctcttgtgagcaaaatgacataaatatattttatgtttttaaggatatcaagagaggtaaaatctgtttcctgagtggcagaagggacatatttagatgtttcctgctatttcctctacccaatttctagttcgttaggactttctcaggcatgttttacacttctctttaataaggttgagctttcataaatatttggtgattcttatttcttggttcaggcttatttaaaagagcctaggtttgttttattttattttatttaaggaaaaacacacagtgcaaaaggttcaaatcttaagggtgcaaatgaatgtcaaaatccagatcatttcatgtcatgatccacatcaaaatatggaaggtttccaattctcttgctgctttcattatgcaccttcccagtcagcaactgctgctcaaaacacaatcaatgtaactgatactgtgacatctattataattgtttttttttcctgtacttaatcttcatatcaggtaaacattttttgtagcttctttcttatttctttcattttttgagggcttgattccttcttatcaatttgaattgctgtctgctctcattccctgttattctgaaggattttctcttgaattttccacaaggcacatatgctataatgaattagtctttgtgtatgaaggaacatttctaccttgcttttatgtttaaatgattgttttgctggatatagcatttgtggctgacttttctcccccagcatttaaatatatcattccactctcatcccacctctattagtaatgatgaaaatttagccaatacctttattattgcttcctagtatagagtaagtcagtattttagtgatgccttccaaattctctgtgtctttgtctttcaacattggtactataatgtgtattgttatgaactgtattgtgcttatcctagaagggtttcactgagttactttcatgtacagactaatgtgtttcatcattgtgaaaaatgtttttcattatttctccatttttttctttttcagtttttattttagaatcaaaccatacatgtacagatatgttacaaagttattttgcatgatgctgaggtttggggtatgacagaaattattaaccagttagtgaacattgtacccataggtagtttttcagcccctgccctttctccctttgtgttccttctagcacaatgtctattgtgcccatcaaccagggattcaataaagaaactgtggtatatatgcaccatggaatactatgcagccataaataagaacaaaatcttgcccttgcagaaacttggatgcagctggaggccattttcctaagtgaacagatgcagaaacaaaaaaccaaaaaccacatgttctcacttataagtgggagctaaacatggggtattcatgggcataaagatgggaacacatttttagcctctttctgtcttctcctttgtgattcctaatacaaatttgttggtattatacacatggacctataatgtctgaggttttattcattcttctttataattttttccttctttatatgagaccatttctattgacttgtttttcagttcactgattcttgtgtcatcttaaattgctattgagtctatctaatacatttttcaattgagttgttgtacttttcatttctagatttcccagtatgcttgttttcatagttttgtctctgtttgagagcctctattggttgaatcattgtctttacaaattcctttttcagtcttttattataggttaaaataattctttgaacatatatttgataagggtggagcacatagacaccatggagatggaccataaggcagggagctccgaattagattaggtgaattttgagtctctgactatatgatgctcttgtgggttttaattatttcccatgttttatgtttctcatattacaaatagcttttatttttaagatagtaactattatagaaattcagcttataaatccctggaaatttctaacagaaagattgatgaaaagagggtttttttaggcccccacaccagcctctgcctgggacctgactttgtctctgagccagtggaatctgtgatgaggttttgagttgggcagtgaaatcaccacagggcaggctgtgctctgggtgctttggatgacaggaggacactccttcagggtcagtgatgctgggagttcaaagggagactcagcatggagctgcctgtgagttatcccagcaatcctgtttggacagtgatcatctcacaagtgtgctcggaagccactggatggccaaaatgtgggctcaggttggagaaggacaaagctatagggatgaaaatataagactcatttgatactctgaaatatcagtacaaccatcatgaattatatgggaagagaaaggagtcacaagattgtgattttttatttgatattaaaatatgtcacctctgctcatttttccctcaaggatgtacctactgatatacatttaaccaaagtcactgtttttaattttcattttagtaactgacagcctatgtgcagagttcctaaataacgaagccagaccatcattgctatgggtgaagccaggaagtgactgtggatgtgaacaaatgtgagattcatgtacacgtctccaaagacagaggccactgatctggggagaacctgcagtcatttcactttcccatacccagatgagaggacaccttgatctgtgttcatctgatgaactctaaaatctggaccatattctgaaggtgtagttcacacttcttttctgtgctagtgggactctctcactgacgtgtattgtaccctctgcataggacagtctgtgatacatactacttgttttctgctaaacacccatcaatcatgtcatttatgagtcttccataggtgttacctaacctatggctatggggtcttccaaaagaatgggccggaggtggagctgtgaaactgtagctggataaaaagtgtaaatgtcaagaaagggtattgaagtggtgataataataataataatccaaattagtctgggctcttggctgtgattactggtaaatgtgaaagagtctaggtttggtttttattagttttatttcaactgataaagtagccagagtaaagtgcataaatcttgaatgttcaactgaatacagtttttgtgtaattcattgtccaaatggaatgatagaatatttcacattcccttgtgcttccctcatggacaatctttgtcagttatcacccctcccacccagcaaaattaactgtctttctgacatctatacaatcatttaggttttcctgtcttaaactttatataaatagcattaagtgtatttttatctttttagacttggtattgctccttacaacttttgaggccttcatttctttcagaggattcaaggtcctgtcttatgtcatttcctgtgattctgaaggattttctctcaaatgtcttgtaagagacatagctgctatgaatgaatgtattttgtttatcaaataatttttttgctttttctttagatttgaagggtattttcgatggatatagatttcctggttgcctttttttttcctttcagcatttaaatatgacatttcactccttctagcctctattggtcctgatgaaaactcagccaatggctatgttgttgtttttctgtatatagtatctgctttcattcttgatgcaatgaagattttctctttgtctttcaatattttaatataatgtgttcagttattaattcctattgattatctaaaagatttttattgaattttttcatctaagaattttttattacttttgaaaagtttttgtcattatttctccaaagatttcttcagccactttctctttctctcctcctttgtgactcttattatacatttgttggtattcttcactctgagctataaatctctgaagtcttcttttttttctaaactttttctttagactcaataatttctatacctctattttcaagttaactgattgttctgccatctcaatttgctattagacctagctaacaaatatttaaattggtttattgtacttttcatttctagagttccaatttggtcattttttatattttccatgtcttttcttgagcccctacttgccgaatcttctttttttttttaaatattttcttttttatgtcaatgatcatagatttaaacataattatttgaacatctgcatattaactgctttgtagtctttgctaaatccaataattgggacaagttagaattagctttcattgactattttctgttgttattattgtagctgctttatttttattcctttaatattgttcatacttctctgcttttttccagaagttgtgaaactaaaaattgtacatttttgatagcatattatagtagctgtctttagattttgggcttttttattttaattttaacttttttagaaatagggtcttactttttcacccaggctggagtgtggtgctgtgaccatagcttgctgcagcctcaacctcttggggtccagaggttctgcagcttcatcctcctgagtagctgggactataagggcatgccaccactctctgttatttttttttttaattgtaagataagagtgtcactattttgcccacccagcctggtctcgaactcctggcatcaagtaatccttctgcatcagcctcccaaagtactgggattacaagcttgagccaccatgtcaggcctggaatttgttttgtttttctgatcattttttaattttcttcttagtttcttgtctgaacttactgatagtacctgacttatgacagttggagttataatgttttgactttcagatggtgtgaatgtgatatgcattcaagtagaaatagaaattctagtatttacacaactattctattttctctttcaatatagtattcaataaattacatgaggtattcaacactttattgtaagataagctttgtgtaagataatgttgaccaacagtaagctaatgtaagtgttctgagcatatttaggataggataggctgaggcataatgttaagtggattagatgtattaaatgtattttcaatgcaagatatagaaaaatctgtatctcatgtggcgtttgaccacagatatctctgcttctttctgttcttaatattaatatttagtttgattttataggaactacacatgtatctgcatagcgaagtggtcaccaatgatctgagacattttgctcaaatatctggaggttataaatctatcttctgtcaacccatctgtgtgtagtttaaaaagcaaactgcatgcaaaatgcagctagttcttacctccctctggttttactttgcaccggaaactcctagttctcatcactcatatctataacttctaggtcactaggaatatgtgcagagattatttcagcaatgtgggtctatcttatccaggaatctgctatttactatcagcagatgtactacttgcctcaaacaaggcatcatcttggactagcaaggctgtgggctttttctgttcatttcctatggtgttctccctgtttagctggaaacactgaagaattatttcccactccttggcttcactcaagtccacccactttggcagcaagctgccagttttatttgctatccttacatgggtaaaactccagttctgcaattcatattgactgagctgggaatagaagggtgctgtcacaggcaaaaggctacagacattttctgtccttactcaaagcactagtactttttttttctataaagaatatgcatccttaattattttatgctttgccaattttcagagtgctgaaatagttttgatatttcaactttatatttataggtgtgtttgttgtttattcttgcacagatttattaaactctttgtgatgccataaacagagatgccttctgaaatgcgtttaaatgaatgtaatagccacactgaaatggtatgatgtaatggactaacataagtaattttggacttgagaacttgagctccaaaatggccaaatagagcagagatgctaaaactgagtggccaccacactagctgtctgtaaaggaagcagctggtataatctagtaaacactgatggtcttcttgaggtttttgtttcatgttgaatcactgtgggaggccagttattatactgctgacagtaataaactgcaaaatcttcagactgcaggctgctgatggtgagagtgaactctgtcccagacccactgccactgaacctggctgggataccagtggccctggtggatgcaccatagatgaggagcctgggagcctggccaggtttctgctggtaccaggctaagttgctgctaacactctgactggccctgcaggagagggtggctctttcccctggagacacagacagggtggctggagactgcgtcatcactatttctccagtggtatctgaaattggaaataaaacagaaatgcactcatgtaatcaaaatcaaacccactgtctttaagtagagccaaaattgttgatctacattgaattttaattatatttcttgctgagcagaggtggcaggagttttcactgatgtgcaaaaccacctcatattcccctcacctgggagccagagtagcaggaggaagagaagctgcgctggggcttccatggttccgtctgggtcctaactgagcagttcctccccagagctctgacccaggcattgatatgggctctggaaggtagggcagctgggagggacatgcaaagcagctggggtgggagctgagctttcagctgcaaagaccacctgcttcttcctctctgcactgagcatcctgcgccgccctggttgtcaggccagaaaagtctgttggctcagtctgagtgtagaactcctcccttgtgctcagagaatttcgctcctgtgtctttcttctcctcaatcacctaaatccacccagaagatgtttggcacaagcctgttaagaacaatataaaaagctgtgttttcacttctctcttcctatcctcaatatgcccagtcatctccctaagtgcattattggatcgatggaaatgaagagtctgttaaaacttaatcttccagatacacctttcatttgcttgttagtaatgttttctgagggtcctgaagctttccattaacccagccacataccctctttgagttaaaaagtgaaaaacttctgtttacagtcacatgtcctggcagccctgacatagatgctccatggcttgccgattgcttgaaattgatcaagtaacttaacttccctgtgtctcggtttccatatctgtgtaactgtgacaatactggtacctaccttatagtgctgtagacagtttaaagaaaataagataaaacatttacaatagtattcaggacattatgtatgcggcaattaattttgtttttatttattaaatattcagcactacagtcatcatcattatcataaatatacttacttagcacagaaaagagtcttcagtctaatccaagaatgttttatccacagccaaatttaattctaaggcttttccttcactaactctacacaactctttaaatcctaatgatttggtcttaatctgtgctaaagtactcacaccttcaatcattcccacccatccctgtctaactcattaattctcatcatccattatcaaaatgttactctataaaaggttcccatgtcctgttgctgtccttctttcttacacaatctttattctaccctgttatcttttgtcttattcttgccccaggacaataaggaaaagctaccatcattacctgttgacttgctccagtataattttttcaggcttgttaccttggaaatgaggactatgtctggcaaagaaacatattcatcgggtcaatgtgttatgaaataaaatattttatctacttatgatccaataattaatttagacctacttgaacggtttttttttaatgaacgaagaagaagatgatataagaggaaaatacaatacaatagaaaacacaagctattataactcttgcttcacggatttctacatatatattagacatatgctgggtatatgtgtgcaatggtgatccaaaaactgaacgctaactggctgaaggaaagcctgtattacattgggtcttgtctatttttccaattatgaacagaaagctacagtactatttgtatgagtatcaaaccttctagctgctgtgatggaggtagagaagatttactgagactaaagccttggaagtactagaagtttgtcctgtgatgttatgggtgttgctgtggttgttgttgttaggaaatacagtggaagtcaaagcaagtagaaaatttacaagctctgctcttcctcatactcacaaccccttctagagatgacagatagtggcataggaatctctgacacctctaaggaagtcttttttgctctttccgggatctttcctgacaagtattgttttgagtcacagatgatgtggaagtaggtgtagaagaaaggactagagcaagggaagaagttttcaatcccaggtagttgttgtaggcacagggaaatggaatttttcatagatttatgctacacttctatcatgttggggagagaggcatcaaaccaagcttattcttgaaagaaacattacattattttaaagagaaggaactatgcatttcttgtcaaatagatgtttaaaattcaaagctacaatttttttttttgacagtatcttgctctgtcgcccaggctgtagtgcagtggtgcgatcttggctcacggtaacctccatctccctggttcaagtggttctcctgccttagcctcccaagtagatgggattacaggcatgtgccaccacacccagctaataacaggagggagtaaagggccacacaagcatgtacacaagagacaacttttcttcttttttacagaataagtctaaatgtaaaatagcgttataatgtatggactcatgtttaagacaagtctcttggttttctaatttgtgttgaacccaagcagtgttgtgatagaaaatgagtttctttttctttaagctgaatttgaatttgctccaatagcctaatagacaccctagtggtaagtcctctgtgatgctcgccattgtccccatgtctaacaaggatttctactggacatagaagtttttctaagtccaacaagagggaaagagactgggccatcattgttctcatctcagatttccacttcctgcatagaaggtatacatataggtagccagacgttatgaaaatggattgtaagcatttgttagtgaacaaaatatgactcaaacagtatttttattttttatttttaaatttctattgcttattatttgagacagactgtcactctgtcacccaggcaggagtgcagtgggtgcaatcttggctcactgcaacattcacctcctgggttccagtgattctcaagcctcagccacccaagtagctgggattacaggtgtgtgtcactacgtccagctcatttttttttttgtatttttagtagagacagggttgcactgtgttggccaggctggtcttcctgacctgaaatgatccgtccatcttggcctccaaaagtgctgggattacaggcgtgagccaccgcactgggatttaagcaatatttttattaagtaaagtgtagaagaaaaagtgtaagtaaggtgacaataagaaaacaaaatgccgtaatggaaaacgataactttagggcagaaaacaagaaaaggcaaaccaagattcctgtagggcaagcctccaatgcacaatccaaggaggaatgtcaagggtgaaaactctggagcatccagatagtggcccaaaataccaaatgctgaaaacccagaatacccaagtaacagcctatgagtgtccccacaccaaatgccaggaaaccctggagtatccaggggctgaccagtgcagaaaatcctggagcctcagtggggtggccaacaatgagccccaaaggcctggttggggccataaaacaatgtgactctggcttcttagagtcaacagaacaggagaattcttacatccaagtgtcctgccttaaacaattgcacaaacataattagcagggacccaaagaaaaaactgcaaagcaaacacatatatcggggcagaaaataaaataaaatggctgatggataaataaaatggcattagaggagaaatgactaagagaaagaacaatgaggatgtagtcaggtgtgctatgggggaattcaaatggactatctagccaaaggccttatttcctggatcatctatataggcaggtggatagatgggacacttacaggtgtgcaggagccaaaatggggccaagcagtgtctgacatggggcctgcatgaagatctctccaggcttcccagctcggatgggttgggctcctatgggggaactggagcacggagcggctggcctgcatgaagcagtggctctgtggcctcttgcccatccccagagctccaacacctgtcaggaaagatgatggttcttaaaacagcctttggctagtgttaatagctctgcaatgttaacaactcagcataaagtcacacagacacacagacactgtagctttgatcgctgtagcgctgatcaccgtctcatcctctctcactgatcgctgtcttgccacttctccaatagctgtcttgcccattgctgatcactgtgtccatcttctcataaagtgccatctcttgctgtctcttgctgtcttgcttctccgctgtttccactgtcttactgccacatcaaatgctgcttctcaccatctctagtggtgagtggctggctcaatattgatgcaaggcaagtcctcagctttgctcaggaaggaatgtaagagtaagccagtaatagaagaaaacagctttattgatggggcagcagtgttacagctctgtgactactcctgcggagcaggggtaattcataggcagagggccgagagtagcagccaggggcatttttacagtcacatttatacccacttttaatcatgtgataattaaggggtaggttgttcagaaatagctagaaaatgggtggtgttgccccaacttccaggtgttgctatggcaggggcaggaatttccaggtgttgccatggcaagcgctgtgacttctggatgtttctatggcaatggtaaactctcatggcactggtgggtatgtcttatggagaggtcctttcagaaccctgttcctgttttggccagcctcacatctggtcctgagcagagtcctgcctacctcttgcctcaaaagtaacaagaaatctgtaatgaaaatttacccagacagaaaactccaattttatatttggtagttagtgacatggtacttatcaaagttacacaaagattcaagtgaataaaaaatactctcagaattattataggaggtcataatgtcctgtagtccaaaaattaatatgcacataacaaaacaaagaaattaaaggctgatatccattgtgaatataaaaataaatatcttaagaaaaaaagaaaaatgcaatcccactgtatatctgcacatttagtgaacacacattgtaaaaagtgttacagtttttataaaaactcttgataggtaattttaatttctgaaaaatgtatatgaactataaggtatgttggatctcttcccctaacttaaaaaatatttcttcacatttaaattctttaccaatttttaatgactttttattgcttagaattttagttgatataaataagaaatgtgtattaaaagcctaccattttgatttaacctatgaaatatatttaaattcttggaaaaatccaaaaatacctagaaaagtgagctcttgccagaagatacacagttctttagtgtcaggctgagattatctcccagaaataacttttggctcatatagcttccaggacactgcaagaataaaagatgtgaagacaatgttacttaattggatttgcaattattcactattcactgttaaccaattttattgaaaaaaaagattccaatcaaatacactgattttaagtgtactgttgggtttaataaataaatacattcttggaagcaaaatcaatacacacaacatttctgtaactccaaaaagttttgtcctgctcttcagcaatcaacttgcttccacctcacagaacagaccatccttattcagcttattgttagtatagattccactatctttttaagaatttcacataaaggaatatagcacatgttcttttgtggctggtgactttcgtgcagcataattgtttcctaggctcattcatgtcgccttgtgtcctcgtgatgtgttactctttacttttgagtactatttaaatatgtagtaatttcacaatgtatcccatcacctgctgatgaccatgtgggttgtttccactttgggctattatggataaagctaccacgaatggcattatacaaggctttgcatgaatatttctttatttcttttaggcaaatacctaggagtgcagttactgggtcttacagtaagtgtttaatactctgtcatactgttttccaaagtggttataccattttacatctcagcccagaattgatgagagttctcaatgtttcagctacttgtttttaagactttttcttaatcatcactcaacagtgaccagaatggctaatgatcattaagtcatgttttccttacaatttccttgacttttgtgggtgcttgacttgtatcaggatattgaaaacaggatcaatattgtcttaaccccttttaaacactttttctaagtaatgatatttaggatgataacaggagatctaaagggaatgttgggagtagtaacaggcattatccaatatttattatcatactccttaagacaatacattttgagtgaaatagcattcagctagactagggataaaaaggttctaatctcagctttagcattaaatattaggaaacctctgagaaaacaatccaggaagacaaatcagagggtgttttgctagtggagaagtgctgcaacacctaaaacctattaatgccagatttttgcagtgatttccactcataaagttgggttgactcctagccttgttctcctatgtgtctgtgtgactttatgctgaggggatgtgacatcacagagggagaagtgcacttgtgtacagaaacatggcttaggagattggctttggatgtggctgcaatgaaatatatattttgaagaagtcccctatgaaatgtcttatacattgtttcttatggcagggtgctcgggctcacacctgtaatctcagcactttgagagaccaaggaggaaggatcacgtaaggccaagaatttgataccagcctgggcaacatagggaaaccacatgtgtacacacacacacacacacacacacaatttgtgaacagtggcatcacgaagtgattatttatgaacaattggctaagaaaattacaaaataaagcaatgtcttctgagctaacaatactataataaagatgtcaattatttaactgtagaaaatacagagaacataaaattgtctatcttaaccatatttaaaagtgcagtgcagtggcattaagcatattcacatgttctgctattattaccgatactgtctccagaattcttttcgtcttataaaaactaatatctataccccttaaacaatactccccccgtttcctctatccttatccctagcaacctccattccagttctgcctctatgtcagtgacatctttgaagcaggttcactgtacactggttaccaacgtacctgagcgcgaggaacacaacacccccacacagcaagttacatgaagggggtttattattacagataagcagcaagggatcacaaaactcttggactcattatggatctgtcccccaaggcatacgaaagttatgtggagctgatagagtcgactgtgtgtaccccgcttgcatcacagctcaggaatccggaaaagcagacactctgggttttatatcctggggtaatgagacgcacagggctaacgtgcttaaggacattccattctatgagaaactggaatacagcacaggtaggctgttctggccagttcctctctatctcaggatgttacaattccagcacattctacaattattcttgagaactcttaaaataatcaagaaagtggagagaactaagtcagcccagggtcattggagaactgtcttgcagttaccccaccacctagacatcccccttagtaaagctagcatatttcctacacccaccaatgtcccccaaactgaaggcagaggtttatcttttcagattgacgaagcaccttgatttacacaatctcagtgcagattattaagccatagtgagagtacatttcgctggtctaaggaaggctactaccactggcaggagggataagacccccaaaagcagtgacctagtctaggatcccatgatcaagaaattaagatgccaaagaggtgaaagggggatctttcagatgccccattgtctgcagccattgagcctgcatcaggatcacctctacttatatttctaggatacctgaggtgtttatccaggtacagaaggcagtgttgggtgttggtaattacatggaacatccgttatgttccacgagaatgtgcccattgtcacgctgattgggcagtgaggttgtttcttggtcagagtgaagtctcatggagtatccaaaatatgacataaattcctctcaagggtggccatggtagcccgagcatctaatagagtgacatatatttagcagtccaggaagcaagctattgccatagtccttttctccacacaggggatcctttagtagttcagtcactcagttgctgttttcctgaccagatgactgggttgttgaaagtggcccatgatttaatggaaatggagcaaaatatagtgttaggggcagcctgcatggctgctatcattgtatgtagtttggcccattgggcagaatggccatgtttagtgtcaatcaaaagatgccatcccctggctggatggtggccacacccagtggacccactggcatgtgttttgtacaatcatcagggccccatgccatattgacataggcatgtctttgaatctttgactctatgtggccaaaggagaagctgaattgtcccctgtgggtcatttgttcccttcttgcaagcttgtcatttgtttatggggcacatgggtattgtggcatcctggttagggctgattcttactgtaacatttccatttagtaatttggatctgttgggcctgtccagttttattgattgtgtttgtaggcaccaaagtgagaatctgtagttaaggtagcagtgtcactcctggtcctctagctctgagatactcaggccctatcagtttcctacagcaagtaaggagttgccattcaaaagaggcacaaatggtggctgcttcaggaaacatttgcctccaaaatctaagtctggtgcacccagtgacaattttacattgccacagactccagtcagcatgcctagaaatagtggacacctggatttacatcgagcaagcaggctctaaaggtcttaaagaaatgccttggacatgtattgttgaatagattcgaaggctaccgttgcaaagggctccattcaaagttgtcaaatttgttcatgcttttgactaaggtgaccaaaaaaaaaaaaaaaaaaaaaaaaaaagactcagggggacagtgcagctaggtaagaatccagtggctttcccgagcttatttgtcttgcatttttggtgacatggattgttgttcatatcggcttcctctggcaggtccacctggaaagcattatatttagcaagaataaaggaggctgtgaatgatgtcactgcggactgcgtatattccctgttgcaaatgtcaaatccatgaagcaaaaagggatttactagaggttattaaattccttacaaattgttgaaaagccttaaaaaacaggctccagtcaaagcctctagaacaattccaagaatcgtactgctggcacaggtcgggggagcatctcctgcgcctgagactccacattcaagctgtctcttgcagcagaagagagagcagctcttctcactactgcccccagaaggacagcagctctggtatcaactatcaactgctagaaatctgacccctttctctgactgcccatcagatgtgttactacagagtcgttttggattgagatgagggaggggaaatgcctgatctcactcaaatgtgctcattttcctggtctgagtcacagccaggcagcacagtcctgtgggcacaatatcttcacttgccaggttcctataaaatgggagtatctttcttgactgtggaaaatatggaggcgaggagggtcaagcaatagcaaaaggagtacttggagttgcctgagcttccactctggtttccccaaatgttttcaatccatttaattcatgataataaacacctttctgcctaaccagccataatcgcttttcttaggtccaaatgattcagtgataaaactaaagagaaaaaataaatacacttttcaacgttgaagctgaccaggtgtctgtctctggtgtttacccctccacatcccacgatgtgtttcatcttccctttgcctcactggagatccaagtgcaagtaatgcttcacatgactgtgatccctagaacttcatcctgatgactgttgaaatcttctctgagttttaccagtggaaatggcaataaatagaaagattccagaaggtcccctagggtccatattttctgtacttcctctctaaaatatgtaaagtcaattatgtttgctcttgctttatatgggctagatctatggccccagcacacatctgaacgccctgtgttgacaacttatccagtattgtattgagtctgaatggtcacatgcttatcatatcatttcttccaatttcatgcaataattgtcatgtcaactgtttggattaagaaccatcagccagaaaaccacagccctgagaaaatagaaatagagtatttcaagctgttcagtgggcatagcaatgatgagtctacagctcattttcaatatataaatattctgtttatgagagtaacagtgtttcagagcctccaccacatctgacagcataacaatgcaatagcacaagagtttgtgtgccagcgttgcttgactaataatgggtttttctttgtctatagggtaagctgcacctgtgcacatgacaagatcatgagctacactttgcttcactttttttgaggtcaataaactgcttgatccaaagccatattatggaagaaattcctgactctgatgaaaacacttggaaaatcctcaaataatattttatgcagaaacataaccgaaaaagaaggcaaattcatatattgcaaataaccagtgccttcctcatgttgcatgaggtccactagaatcacctgacaccagctgttagtctgagccctgatgtgtggtacaatgttaagggttcaagaggcatcagttttcttggcaaattaggtgttcagaagagccaatagccctgtacatctcagttagttgaaactcacattactgagtccccacagggaccttattaacattggttcatgaggctacctggggaagctgggaaaggtgattgactgaagtccatgtgttgaatcatcctgattattaaaagcccctgcttgttaatggcatttcacttaatattcacttggaaagcattttttttattatggctcatttttgaaatgtctggtcatagcttttgcagaatgactttgtctgaaatcagcctgttgcatttattttaagacttgatgatctgtcaaaaccaacagccaatatttattaaactgctgttatcttgcaatgggatcatcagatgtaaccattgcagtttacccacggttaggatttttacatttccagtgcttctttgacaatgacactaatgtgactctatccagcgtgcattgttgtgagaactctatttggcctatcatcattgtgggcatgaacataatggagactttcataggatgcaatggttaatattcaacattagtcaaaatttgctctagtcctaccctcggagctctactgggttggaaaaatattttaggtaaggacaaccatttggtaaagttttaaaaataaaggctacaaataaattttctgtagcaagagtattgcatacataatagaataaatgtgcttaaatatgaatactatatatatttgtagccaacattttatcaaacaaatatatattcacttctatgtatcttatatatatgcacatttttccataaataaggtaaattttaattttttattgaaatactagttttaattctgttcttaattttctcttaataacttcataaattgatcactaaatattcacatttataccaccaatttaagaaaaaaatacatatgtttatatacacgtagaggtgtaaataccgtatcaggaagcctttatgcataatgattggttactggttaaatacacaactcagtgacagaaaacagtaaacatttgttttcgtgttcatggatgctcacgttcacaatcctctggctgaccaaggaagggctctgatgagtcgttcctctgcagggcactgagctcaccttcagcctacagatatgaattgtctgaggacaaggctgaacagcagtgactacacatgacacaagattcttgtggcaggtcacaggagtgaacaacatcccaaatcaaactgcacagttgaatttaagtccaataatttctaacatagcttcacacattttaaatatattcctttatttcagtgagtacacattttcaagaaaatgtttactccatttaattatagaagggtttgatcattccatgaacaaataattatgttttcaaactttacaatcctgaaaatatttgcaaatgtaaatttgcattaataagaaaataaagctggatgtgtttccaacatgtggcttcaaatataatttatttaaatggactcattggggtaaaaatcattttaacttatgtaaatatccctttttgctgtgcttgtgtcctatagagttgcccaataagagttcctcccgtgagatttggaaatcagaaaaggaagactcaatattatccattggtaactaagacaggtacaaggacagaggtgaggactggagaaacacctggaaggatgttgcaggaagctaagagcatcagcacgcctacccctaagcttccagacaggactgaggaccacatggttagaaagcccttactttaggggcggatgcattctgttttctgagggagaaccagagaatcctgcctctaatatcaactttcctgactactgtatccttgtctttgaaaggctgtagtctgaacgttaatcataggcattggttcattcttgttatacccaacagagccaagaaacctagtggggaaaggcactcagggtgcaaaatattgctgctggaatgcaattgaaataggccctgttatcccatggaactaaggtttatggttttttgaataaacttagaaattgtctccccctccctgtcttaaaactcaagatagttacatctgtcttacctgagtcctttttttcagtaaaccaaccatcaggcctcccagatactattaagaagctgaaacttacatatcactgaattgggacagtgagacatcagaaccttcacccactgtgattgcataactgacctcctgcttcttcttgaccaaattatcttccttacccctccctaattcctgttttcaacatttcttccctcctatataaacccctaattaattttgtcagagagatacaattgagaatggcgtcccatctcctcggctgcagcacctgattaaagcctgttccttggcaatacttgttgtcttcgagattggctttctgtgtggtgagctgcaggatctacaccaagtccctggtatttcagtaagaaaattctctgcaaccttcagtgctttggcttattgtaacctgaaatcaaatttatccacaatttctgagataacttgatataactctaggattcactttgtccaccactgtttaccagtctgagcttgccagctcccaacccttcctagtgccaatgaactttctcaaagtgcaataggtaatatttccctttttcatggaacactgactttttctttgttcttccaacgtactgaagaccactgagttttcctgtatgcctcatttggcaaatatttctcttcaaataaaacattaaatttagagattcatctctacattttatttagacttcagcagtttattctaattctctgtattaagactattcctgcttagaatatctatagtggcttcttctgcattatgatttccaactgaagccataaactagactcctcaggtgtcatgatctctgtttttattaaataaggagaagcattgctatgtctgtgcagttggtgctgagaaagagaaaagaattagggtgcagaggtgacttcatgtccccatctaccaacaccatcagagtgtggctgcatctgaggaacactctcagctgatggaggcatcaggagaagctgctggggcagcccagcctcacacatctgcttccctgggggtttatgtttgggtgtgtaacactgtgggagggtaactattatactgttggcagtaataagttgcaaaatcttcaggctgcaggctgctgatggtgagagtgaaatctgtcccagatccactgccgctgaactttgatgggaccccactttgcaaactggatgcagcatagatcagggacttaggggctttccctggtttctgctgaaaccaggctaaataattgctaatgccctgactcgcccgacaagtgatggtgactctgtctcctacagatgcagacagtgaggatggagactgggtcatctggatgtcacatctggcacctgagattggaaacataaaaacaaatgtccacacaattaatcatgttgtaagagaatttccctgaatagtaaagcagtactgagcaccctgggctgagtaaactgctagtgttctccatccttacctgggaaacagagcagcaggagccccaggagctgagcgaggactctcatgtccatgctgtgtcctgactgggtctgattcctgcacaaagtctgaccagcctattaataaggcttcagggcaggaggttgtgctctgggaacatgcaaatgagcaggggatggggcaggctgggcacagctgcagagctggcgcatctcagtaactcagcaccagctcagtgtccccacgtgtcccaggtaagatcaaggtagctcaaatttgtctgcagagaatgtgtttctactggggactattttgttatgggaaacattttatggtttctttttgacaatttgaaatattccttgggagtcgatggagcaatgtatttcattggtgtatggggattatttaggagaatattcttttttgtaggaaacacatagtaaaattttagaccctacaattttcaggtcttcaaaagactctcatgtgatttctgttagggaaggtggtacttatcatatacttgcaacatttctgtgagtttaacattgctcctttctaaaaaaaaattaaaaataaaatttattcacatgatgctacatatatttgtaaatgttaggtaatggtgttatgccattgttcttaccactgtaagatcaagcaatttacttcagatacactaagttgataccgtgtttcctcaatgcatgcagcaattacagatccaccattatcaagagctctaggtctctttaatatccagagactaaatgggctgcaccttattcctgttttgcaccttattcctgttttgggcaccttcatagtctaccttcttttctgccattaagtattatttcccaacattcatctctcttagtgagggtgatcactgcatggagcatgtccctgccatgcaccataggtgacactttcttcttttactttttatcagggacatcatcctgacccagacaccaagatccctgttaacatcttttggaaagaggcactcaatcttttatcaagcaactgcccaggtacatggagaaatcagttggttccagatgaaactggacagggatttgcactcgttatatctcatatctctaatgtgcccaaaaatgtcccggcctggttccgtgggaggggaagtggatccaactacatcagcatcagtgggctgcagcctaggactccataaaattttactgatgcctgactaggagagccaaatcacagtgctgtagcctctgcacaaaccttcctgctgctttataagctgcctgaattttaagggaaattgcttatattggaagaaaggaagaaagctccatttgtcctctaaatgtttgctgaaaataaactgacaaaaggaagattaataagagaaaaggcaaacaaaattcacttaaagtgcagcaggatatcatagcaaggtgattacccagataactcaatgagatccaggtgtttatgtttcctttctagggaagaggtaattgggaaatgtaggcaacctggagagaatagatgagaatagaaatgcatcctcaaaagaacaggtaatcacctccctaggtaaagtatcaactttgagtctcttccatttttgattcctcttttgtgttaatcttccttgatataaaaattctcaggaagagttttcttaaaaattggtttccttctgaagaatttgcttttaggcaggtaggggatatttaggaaaagccccctgtgcatttcctgctttctaaatgcctttggttttatataatcatcatacaaatgcagcacagtttgagatgttattttctggattcctttacttgcaacccacctgccaagatcctgttccagagagatgtggctacagactgaaagagcagttgtcccctcaacaacgtggaggttggggcactgaccactggtgcagatgaaaacctgtgtagaacttttgcatctccaagttatgtagtaatagattacttttgactggaagccttaatgataaaataaatagttgattaacccttttttatgttatacatattatatactctattcttccaataaagtatgctaaagaaaaaatgttattgagaaaaccttaaaaatgagaaaatatatttagtacttattaagcgcttgctcacaggtgacacacagaagaaaatataagtggatctgcaaatttcaaacccaagttattcaagggttaactgtaccatgatgaatgtagcagtccccatctatagtctagggcttttccctttgctgtatctctgctcatttccaatggctatatatatgtcttatgtgcttcatgatcttgggcagagaggtctgcttgcatgccttgctggccagatggcctgcaatgtgtatctcttaggaaagtgctatggtttgactgtgtcctccagaatccatcgttgtaaagttaaatctcagtgaaatggtattgccaggtggggcctattgagatgtgttagatcatgagggtggagccctctagtggaataccttaatgccactataaacagggtttatggggctggaatctctctgtctcttctgctggtctgtcatgttaagacatggccttcgttcctttgaaggactgaaagctccaggcgtcatcttgaaagcagagaaagacgaccttaacctgcccatgccttgatcttaaatttcccattctccagaaatgtgagaaaataaatttctgttctttatgaattacacagtggcaaggaacctaacctgttatagcagcttgaaagagaacaagagagacagctcacaatcagtgaggacagaatgaggtgtatacataccttagcttcctcgtctctcaggtggaatagcccagaggaatttagtccatgtttccacatgtggttgatcttcagttatcctgagtcaggtgggttgttgatgtgtcttttaccattcatcttctgttccctccctcactttcttcctttcctcccagtgtaaatttgctgcctaaacaggaatcctcattgctggtggacccaaactaagatagtaaataaaatcattaatcttttgtatgaggggtatttctcatctgaattcttttatcatttccctttctttgacatgtaggaatattcaggaaacacacaattttttttttaaccaatctattttagattgaatttatgcggtgattttttgtgtgtgtgtgttaaaacaaaaaattacgttgtaagccactaaccagctgaacggactcctcttttggtagagagaacttcaaagaaatctgaaaaactaggttaggccatgactggcaggtgggtttagatgtacctcattatatggtccttcctttggagttcagacacaactgaccagcattatcattacaacagagatctttggattgacaaaacagatgctttgtagcaataagataccatactccaacacgacagataataggccctgaagaaaatcaaaatattttaccctaaaagtatttctttgacatattctgaagtggccctgcaagctgcctgttgtgggggaaatttgcattctgcagagaatctcctccccttactaagtcttttccaaagagtctgacattttttttaaggtctgataaacaacattagccacctactttgtttgctacccataggattcatctaggtgacaagaacctttgcttccacacccccttttctaaactcaagcatttctttatgatgaattcaagtgtttaggcagagcttaactctttcaaccagttggcagtcaggaaatctttgaatccacctatgacctggaagcccctacttcaagctatcccacctttccaggacaaactaatgtaaatcttatatgtattgatttatgtctttccctgtaatttctgtctctccaaagtatttaaatgtgtattcttgtcaccctgggcacatgtttgcaggacatcctaaggctgtgtcacaggccataagctttgggaaaataaacctataaattgattgagacccgtctcagatactgttttgtttatactggtcacaaacttaaaaatcctctaaaacaatctacacatcaataaatctacattagagacagtggaatgatcataccttaacagttaaagctcacaatttaaaggaacctgagtctaagattttggccagctctcttgcttcataaaaaatacttcgtgatttttaaaattttactttagagaaaggcaatttgggggaatatatttattgtcaatgggatgaataatgtctctaccctaaaagatgtccatgtcctcatctctggaacccaagtgttacaggagttattaagaaattattttaggcagataggaaaagagtgtccttggtaaggttttctttcctttaaagcagctccagaaacgtttcttgtctagcaggaaagccctggctcttagagccaggctgggaagctttgatttgcaaattccggccattagaaactgagtccagccaaacctgtcaattcccaccatcttcttccttgcccccacatgtgcctgacaacaaggctgcccccacatatccccatgtgtagagaatattttggcaccctgcatttgcatattaaaagtcttgttgggaaggccagttattttgcaggcttcatgaatggcatgcctggtcaaaccagtccctagagccctatataaatcagacaccacctcctccagcctcctcatataagagccacttttctgctgcaatggagttttgtctttgttggaatccctcctccctctgtctctgtgtgggggagctgttttcttcttccttccttcttgcatattaaacctttctctccctaaaaccactccacgtgtgtctgtgttgttttatccaaagtggtgtgagaccaagaaccctggtgttcctccagtcaacggagccgtatcataaaaattctaccttacatagcaaaaagagaacttgacagatataagtgaagaataagcgacccagttatctagatgaaaccaatatgatcacaaaggtccttaaaataaaagaggaggcttgcagtcagagaggagctgggacaatggagagggatgtggtttgaagagggaacgggttactctgctacaaaaaaaaatatgaccacgggggtactttgcttaaaaaatatcccagaatgtcctgctatacttagagagcatttgcttcccaaatagaaaatgaaggcctccttcatttcacaccagtttctgctacatgcactgtatcgctctgttgcttggtgtctacgcacttagaactgctctgtcttctttccgaaatgactttcttcattatgtaatgtacatttctgtcactggtaacattcttggctttgtagtctactttatctgatattagtatttgctactgattcattttattaattttgcatactatgccattttcttttcttttatattgagtctacttctagtgtcatatttgatgtgagtgtcttatagacagtatactgttcggacattcctttttgattcatcaattgctgtctgttataatttactaatttgcatatttaatatatcgataattattgatatactaagatttaagtctttgctctacttttttgctgtatctttttttgcttctccgttttctttttgctgccttcctttgggttacttgaacatttttagaatttcattttaattttacctaatttgagggtatctctttttatagtgatttttaaattggttgtcatggtatttcctttatatccatagcttctcacagtatgttggtgtcataatattaccatttaaaataaatataaaattttaccttgttttatgtcatttttcttcccccattagtaatagattgtgcacatatactcatgtacccttcacaccatctctagcctacttataatacctgacgcgatatgtatacatgacttaacctgtgtggattcaaccaagtggtactaagcacatggtgaagtcaagtttttctttttggaactttgtggattttttttctatatatttttgatccaggtttagttgaatccatggatgcagatcccatggatagagagatgactatactgctccttataactctgaggatcaactctgtggttcctccattctgggctggctgaactgatctctgctgagcctgctcatgtgtctgcagttaccctgtggttcagttgtgactagatggtctgatatgacttgtttaacctatctggaagctgatttgatgtgcaggttggacaacatttggtttcggtttacataggtcagggagatggggcctgttccccaacctctattcagttcgtttctagatcaactcaggagttcgtctattcattgtaggttgtttgggggaaattccacacagaacattggtaatgaagaagctgaactgctgtcatcagttattgttatcatctgaaatgcatcatatattaccaaagtctccccagggtggcccaacagtgcagctcagctcaccccatccagtcacttccctggttgcctgcaggtgtgagaaaggcaatgtgctcagtcacaggaaagacaggggccctccctggtgctgaaacctgcagatagttttcacacagtttcattccaaaatacaaagacttcattttctttgtctttaaaatagttatacattttctttctataatgtccccatgcttttcaactaatttgaattttcagaactggaagtatttattatttctgtgttagatgctcttagtcacttatggcaagagtgagttaatagagacaggatatggattagccatagaacaatacagaagtgtgtggattcagataggataaagatcaaagcggtgacaaatacattcttttgaagcggattctcataggtcaccagtcaatgtccgcattcaaggtgcgatgatgtgtcagctacattgtgcaaatggtcagctctgcagagtaaacttggacagcacactacaggaccaaaattacctgtaaaggtatggggaaaataaaccatcatagaaaaaatagtgtgaaggagttctcggttatttatacttggatatcaagcagaacactataatcaatgaagctataacctaaaaactttaagacttttaaagaggtttcccttttctcagggtatttctcaggaaaaaatttataaattatggataaactacttgcacaattagctacaataaatcccttccctgcactcatcctttggttggcctcattctaaatggactcaggtgttacccatgtgtcttgctcaggccaataggataatagcagatgtgacagaattggaatattggaaagggcttgcacatcgaagctttcctctctttcacagtgcttggaaaccctaaggtcacaatgagaataagcctgtgcccatctccattcaatgtcagtggcatggctgctcttaggtctattatttgttcttaaaatgtgtgttcagtttgttataaacatgtaagaaattacctgcaaatttatcaacttaagactacacccatttataatctctcaatttctgagtcagcagtcagcacatggctttgctggatcctgcccattggatttcacaagactgtgccacagtgtagactgttcttcattctcacctgagactccctgagaagagagatattttagagctctttcaggtagttgcagagcccatgccttagcacctctgtgactcagggcttcagcttcttactggctcttggctcaaggctgctctcaggtcccagaggctgtggacaattccctgccatgtgatgctcacacaggcaatgcccacatggctggttgtttgttcaaggccagcagaaggtttcagagagtgtctctttccagtctgctatgacagaggcttacagaatacaatacaatcattggaaagacatctcataacctctgccataccatatgggttagaagcaagcctaagttctacctgttctctgtggaggtagatcacacaatgccatgactcactggagacaggtttctgctagggtgttctggcatctttagtttcctcaaatatcagggtactcgtactgagtgtgaaatctctcctacatctacttcatcgtgctgtgtctgactgatcagacatttgacacatgacttttttttttttttgtgacggagtctcactctgtcgctgaggctggagtgcaatggcatcatgtcggcccactgcaacctctgtctcctgggttcaagcaattctcctgcctcagcctcccgagcagctgggattacaggcacccaccaccatgccaggctagtttttatatttttagtagagacggggtttcaccatgttggccaggctggtctcaaactcctgacctccggtgatccacccatctcggcgccccaagatgggattatagggatgagctaccatgcctagcctactttagtttttaagtagatttaatgaaatctatttagtagccaaaagccaagaatgccaatagttttacctggctactctctgaaacaatggtattaaaaagggtctttccagcccctttccagcagaaagacaggtgctaagaaacagtggaagtgtgaaggtgggggaagggagagaaacagtttttatatacctaaactaacccagctgcatgtaaaccagtaactactcatcaaaataaaatacagaaagcatattagttttggtttggtgtgaaccagccttaaatacaaagttgttacactgaatgggtttaattgaccaaaatgcgtagggaaggcagaaaggattaggatgcccttctactcagctttatctgctgtcaagtctggttcctcaggggacacatggatcccctccattgtcctgcagattctgccaggccaaggctgttaaatctggcggggtctcatgtgtggacttctgggtgtatacagggagaaactagagaaaggccgagcagatttttactgcatgtaggtaatctacgtgggcttttagagaaaaaaggctttagataaaaagtgtttgacaaagtcacacatggtttgtaaaaaaacaaaaaataaaatacaacttgaaaactcttggagaagtgacactttagtttcccaaatcactcttcttcatacacttccacttagctttttttcaccttctagctctgtggtcttagaaggacatgcacttaaaataatttgtttccataggaatccaacaagtaaaagcataaacaacatcaaataaactacatcattagcatagaagcatgtcaaagaaactgagattagattttgagttttggcacaagtattagagaaatagagaaaagatttaaaagatagaataagacttacacaagaaagcaggacagcaatacgacaattgaacctatcatagaataataggttgtgataatggatggtgagaagaaatgcattggacagacatgcatgggcatgattgatttgagcaatttagcatggatcaagacaaaatctttaggatttaaagggctgtgagctgggtagtaaaaagccccattttagcacctcttggggctgtagatggaaagaacttggatttaaaactattttcaataagtgtctgctaagtgctaagtattatagctataaggatacctaaattaatagaagcacatattatctgttggatatattctaaatcttttaccttgtttaaattgtaaaccgacctatgaggtagaacctattattgtcacagcattgcgggtatagaaaaggaggcaaaggggggttaagttactttactaatgtcacacaacatgtaagcggtaaagctccatccccaaccccaagggtttgacttcagggcctgccaagacaacatctggactgttgcatggatcttgcctggctgtacatgaagctctaattccaggatggatgaagattccattagaacttggagtagcattaataaaattgcttccttgagaccaggcgaagtgtccagaaagcaaaggagtttaactgcttaaaggaaaggtgcagatttgtaggaaatgaagctctggactgtgaacagagtttttcaaaacaattaaggagaagagaaattgagtctagtttgatagatgtgttgtgcagagtgagtgtagtggagattagagaatcagccaaggaattatcccctgccttcatggatggcatcaacatctgtcttcatggcaattgtattggcagcctgagtgtcagagcctgggtcctgcccatccatgcagctgtggtcacctttgcacctgcagtgctggagttacttgagtgttactctttgaggtagcttcaggacacttggtaaaaatcactaagtggcaagtgaaaggcttggaagaaaagttctaatcagctcttcattcccacctgatgcaatttttgctgctgctgggaccccaagttctttgtctcctccccgccgcttttttttttttttttttttttttgagacagagttttgcttttgtttcccaggctggagtacagtggtgtgatctcggctcactgcaacctctgcctcctgggttcaagtgattctcctgcctcagcctcccaagtagctgggattacaagtgtgtacccccacgcctggctaattttgtatttttagtagagatggggtttcaccatgttggtcaggctgatttcaaactcctgacttcaggtgatccacccaccttggcctcccaaagtactgagattataggtgtgagccatcgcgcctgaccccttgcctcttttgtaaatagaaatcaacaccaggccaaacagaaattgtctcaggcaaggtttaataggtttgtggcaagagcaaagcaagggagcagcctatgggtaagagatcctggtggctattccttgaagtgcccagctcttaccattttaaggaagctgaggcggaaaaaggaatgacatacaagcatggttaggcaaagttttctttgcatttgtgcagtggagcgtcatgctctaacatatataacatggtgaggaaatggaggataagccctgccttgggtggatattttagtattacaatgagattataatgaggaaaaatcagtgaaaggtcagttctggggaccatcccaccttcagctggctagatctcatttggtgctttggggaaatgccagctctatcagcaaccttggaagatggtcaggttcttatcaggaatgttagagttccactttagaaaccttgggaggctgggcacagtggctcacgcctataatcccagcactttgggaggctgaggagggcagatcactggaggtcagcagtttgagaccagcctggccaacatggtgaaacgctgtctctactaaaagtacaaaacatagccgggcatggtggtgtgcacctgtagtcctagctactctggaggttgaggcaggagaatcgcttgaacctggaaggcataggttgcagtgagtgtagatcgtgccactgcactgcatcctgagtgacagagtgagactctatctgaagaaaaaaaaaaaatgaaatcttgagatactcaggccctatcattttcctacagcaagcgaggagttgccattcaaaagaggcacaactggtggccacttcaggaaacttttgcatccaaaagctgagtctggtgcacctagtgacattgccacagactccagtcagcatgcatagaaatagtggatacctggatttccatcgagcaagcaggctctaaaggtcttaaataaatgccttggacatgtatagttgtatagattccaaggctaccgttgcaaagggctccattcaaagttggcaactttgttcatgattttgactaaggtgaccaaaaaaaaaaaaaaaaaaaaaagactcagggggacagtgcaactaggtgagaacccagtggctttcctgagcttatttgtcttgcatttttgttgacatggattgttgttcacattgtcttcctctggcaggtccacctggaaagcattatatatttagcaagaaaaaaggaggctgtgaatgatgtcactgcggactgcgtatattccctgttgcaaatgtcagatccatgaagcataaagtgattaactagaagatattaaattccttacaaattgttgaaaagccttaaagaacaggctccagtcaaagcctctagaacaattccaagaatcatactgctggcacaggctggggaggagctcctactgcttgagacattcaagctgtcttttgcagcagaaaagagaccagctcttctcactactgcccccaggaggacagcagctctgctatcaactctcaactgctggaaatctgacccctttctctgactgcccatcagatgtgtcactacagagtcgttttggattgagatgagggaggggaaatgtctgatttcactcaaatgtgctcattttcctggtctgggtctcagccaggcagcacagtcctgtgggcacaatatcttcacttgccaggttcctataaaatgagagtatctttcttgactgtggaaaatatggaggcgaggagggtcaagcaatagcaaaaggagtacttggagttgcctgagcttccactctggtttccccaaatgttttcaatccatttaattcatgataataaacacctttctgcctaaccagccataatcgcttttcttagatccaaatgattcagtgataaaagtaaagagaaaaaataaatacacttttcaacgttgaagctgaccaggtgtctgcctctggtgtttacccctccacatcccactatgcatttcatcttccctttgcctcactggagatccaagtgcaagtaatgcttcacatgactgtgatccctagaacttcatcctgatgactgttgaaatcttctctgagttttaccagtggaaatggcaataaatagaaagattccagaaggtcccctagggtccatattttctgtacttcctctctaaaatatgtaaaatcagttatttttgctcttgctttatatgggctagatctatggccccagcacacatctgaatgccctgtgttgacaacttatccagtattgtattaagtctaaatggtgacatgcttatcatatcatttcttccaatttcttggaataattgtcatgtcaattctttgcattaagaaccatcagccagaaaaccacagccctgagaaaatagaaatagagtatttcaagctgttcagttggcacaagaatgatgaatctgcagctcattttcaagatataaatattctgtttatggaagtaacagcaccattcatgattagtgtttcagagcctccaccacttctgacagcatagcaattcaatagcacaagggtttgtgtgacagctttgcttgactaataatgggtttttccctgtctatagggaaagctgcacctgtgcacatgacaagagcatgagctacattttgcttcactttttttgaggcaaataagttgcttgatccaaagccatattatggaagaacttcctgactctgatgaaaactccttgaaaatccacaaataatattttatgcagaaacataaccgaaaaggaaggcaaatccatatatagtaaaataaccactgccatcctcatgttccatgaggtccactagaatcacctgataccagtaattagtctgagccctgatgtgtggtacaatgttaagggttctggaggggtcagttttcttggcaaattgggtgttcagaagagccagtagccctgtacatctcagttagttgaaagtcatattattgagtctccacagggacctccataacactggttcgtgaggctagctgggaaagctggaagaggtaactgaagtccatatgttgaatcatcctcattattaaaagccccctggtcgttaatggcatttcaattaatattcacttggaaagcttcttattcttgattatggctcatttttgaaacttctagtcatagctcttacagaatgactttgtctgaaatcatcctgttgcatttcttttaaggcctgatgatctgtcaaaaccaacagccaatattattaaactgctgttctctttgcaacgtgatcatcagatgtaggccttgcagtttacccactgttatgagttttacatttccagggcttccttgacaatggcactgatgtgactccatccagcatccattgttgtgagaactctatttggaatatcatcattgtgggcatgaacataatggagacttttataggatgcaatggttaatattcaacattattcaaaatttgctctagccttacccttggagctctactggattggaaaaatattttaggtaaggacaaccatttggtaaagttttaaaaataaaggctacaaataaattttctgtagcaagagtatgaattaggtgtcatcacaaataccattttttttgtgtggaatgtaacaattatttaaatgtatataatttagataatattttataaataaaatatgtatatattgcatatataatagaataaatgtacttaaatatgaatactgtacgtagttgtagccaacattttatcaaataaatatatattcacttctatgtatcttaaatatatatgcacttttttccataaagaaggtaaattttaattttttattgaaatactaattagttttaattttgtgtttttctcttaataacttcataatttgattactaaatattcatatttataccaccaattcaagaaaaaatatgtatgtttatataggtagaggtgtaaatactgtatcaggaagtgtttatgcattaattacggtaactggttaaatgtacaactcagtggctgataacagtaaacatttgttttcatgttcatagatgctcatgttcacaatcatctggctgatcaaggaaggtctctgctgagtggctcctctcagcagagaggagcctgtagattgtattcagcctgtagatatcagttgtttaacgacaaggctgaacagcagtgactacacatgacacaagattcttgtggcaggtcacagtagtgatcaacatcccaaaccaaaccgcacagttgaatttaagtccaataatttctaacatagcttcaaacatttaaaatatattcctttatttcaatgagtataagtttttaagaaaatgtttactccacttaattgtagaggtgtttgatcattccatagacaaataatcatgttttcaaccttcacaatcctgaaaatatttgcaaatgtaagtttgcattaataagaaaacaaagctggatgtgttttcaacatgtggcttcaaatataatttttttaaatgacctttttgggggaaaatcattttaacttatggaaatatccctctttacctctcatgtcctatagggttgcccaataagagggtcccccatgagatttggaagtgagaaaaggaagactcagtattatccattggtacctaagaggcagagagacaaaggtgaggactggagaaacacctggaaagatgctctaggaagcgagaacttcagcaattccagacttaaacttccagacaggactgaggaccacatgggtagaaaacccttacttcaggggtggatacattctgttttcagtgggagcaccaaagaatgctgcttctaatatcaactttcctgaatactatatccttggttttgaaaggttgtagtgtgaatgttaatcataggaattgggtcattcttgtcataccaaacagagccatgaaaccagaggggaaaggcactcagggtgaaaaatattgtttctagaatgcaattgaaataggccctattatgccatggaactaatgtttatggttttttgaataaacatagaaattgacttccccgatcttaaaactcaagatagttacatctgtcttacctgagttcttttttcagtaaaccaaccatcaggcctcccagatactatcaaggagctgaaacttacatatcactgaatcaggacagtgggacatcagacccttcactcattatgactgcataactgacctcctgcttcttgttgaccaaattatctcccttaaccctccataattcctgttttcccacatttcttccgtgctatataaacccctaatttttgttggtcagggagatacatttgagaatggtgtcccatctcctcagctacagcacctgattaaagccttttccttggcaatacttgccttagtgattggctttctgtgtggtgagctgcaggatctacgctgaatccctggtatttcagtaacaaaacactctgcaaccttcactgctttggcttcttgtaacctgaaatcaaatttgtccacaacttctgagataacttgatataattctaggattcactttgtccaccactgcttcccagtctgagcttgccagctcccaacccttcctagtgccaatgaactttctcaaagagccataggtaatattttccctttttcatgaaacactaactttttctttgttcttgccacatattgaagaccactgagttttcctgtatgccccatttgggaaatatttctgtgtaaataaaacattacatttagagattcatctctacattttatttagacgtcagtagtttactttaattctctgtattaagacaattcctgcctagaatatctatagtggcttcttctctgttatataaagtccaactgaagccataaactagactcctcaggtgtcatgatctctgtctgtattaaattaggagaggcattgctatgtctgtgtagttggggctgagaaagagaaaagaattagggtgcagaggtgacttcatgtccccttctaccaacaccatcagagtgtggctgcatctgaggaacaatctcagctgatggaggcatcaggaggagcagctggggcagcccagcctcacacatctgcttccctgggggtttatgttcgggtgtgtaacactgtgggagggtaactattatgctgtagacagtaataagttgcaaaatcttcaggctgcaggctgctgattgtgagagtgaattctgtcccagatccactgccgctgaaccttgatgggaccccactttgcaaactggatgcagcatagatcaggcgcttaggggctttccctggtttctgctgataccagcctaaatcatttctaatgccctgacttgcccggcaagtgatggtgactctgtctcctacagatgcagacagggaggatggagactgggtcatctggatgtcacacctggcacctgagattggaaacataaaaacaaatgtccacacaattaatcatgttgtaagagaatttccctgaacagtaaagcagtactgagcactctgggctgagtaaactgctagtgttctccatccttacctgggaaccagagcagcaggagccccaggagctgagcggggaccctcatgtccatgctgtgtcctgagtgggactgattcctgcatgaagtgtgtccagcctattaataaggcttcagggcaggaggctgtgctctgggaacatgcaaatgagcaggggatggggcaggctgggcgcagctgcagggctggctcatctcagtaactcagcagcagctcagtgtccccaggtgtcccaggtaagatcagggtagcacagatttgtctgcagagaatgggtttctactggagactattttgttacgagagacattttttagattttttttgacaatttgaaatattcctcaggagtcggtggagtatcatatttcattggcgtatggggagtatataggaggatattctttttttgtaggaaacacatagtaaagttttagacgatagaattctaaggtctttaaaagactattgtataattccggttagggaagggggtatttattgtatacttgcaacttttctgtaagtttatcattgttcctttctaaaaaaaattaaaaataaaatatattgacatgatgatgcatatatttgtaagtatatgcagctagagagaaaaaacagatcacctacaaagggaagccatcagactaacagaagacctctcagcagaagagattgggggcctatatttaacattcttaaagaaaataaattccaactaagaatttcatatttggacaaactaagcttcggaagcaaaggagaaataagatccttttcagacaagcaaatgctcaggaaatttgttaccaccagacctgcctaacacaagcttctggaagaagcactaaatatggaaatgaaacaccgttatcagccactataaaaacacactgaagtacacagaccagtgacattataaagcaaccacacaaacaagttggcaaaataacaggctaacagcatgatggtggtatcaaatctaacatatcaatattaaccttgaatgtcaacaggctaaacgccccacttaaaagacacagggtggcaagctggataaagaagcaagaccaaatgttatgctgccttaaggagacccatctcacatgcaatgaagcccatggactcatataaagggatggagaaaaatctaccaagcaaatggaaaacagaaaaaaaccaggattttaattctaattcagatgaaacagactttaagtcaacaaaaatcaaaaagacaaagaagggcattacataacagtaaagggttcaattcaccaagaagatctagttactctaaatctatatgctgccagctcaagatcacctagattcataaagaaagttcttagacactttgaaggagacttagattcccacacaataatagtgggagatttcaacaccccactgacagtattatacagattataatctgtataattaattttctgaggcagaaaattaacaaaggtattcaggacttggactcaaccctggatcaaatggaccttatataaatctgcagaactcttcaccccaaaacaacagaatatacatattctcatcaccacatggcacatatgctaaaattgaccacacaatcggacatacatcaatattcagcaagtgcaaaagaaccaaaatcatgccaacctctctcggaccacagcaaaatgaatgtagaattcaagactaagaaaatcactcaaaaccatggaaattaaacaacatgctcctgaatgacttgggtaaataatgaagttaaggcagaaatcaaaacgttctttgaaatgaatgagaacaaagatacaatataccagaatctctgggacacaggttaggcagtgttaagagggaaatttatagcactaaatgcccacatcagaaagttatacctcagattaacagcctaatatcacaactaaaagaactagagaagcaagggaaaaccaattccaaatctagcagaaaacaagaaataaccaaaatcagagttgaactgaagtagataagacacacaaaaaaattcaaaagatcaatgaagccagtgcctgtttttattttgaaaaagctaatgagataaatagaccactagctagactaataaagaagaaaagggtgagtatccaaatacataaaattagaagtgacaaaaggacattatcactgaccccacagaaatacaactaaccatcagagactactatgaacacctctatgcacaataactagaaaatctagaagaaatagataaattcctggatgcatacaccctcccaagactgaaccagaaagaaattgagtccctgaagtgagcaaaaatgagcttgtaattgaatcagtaataaatagcctaccaaccaaaaaaatcccaggtccaaatggattcacaactgaattaattccgcggatccttctatagtgtcacctaaatgtcgacggccag

SEQ ID NO: 4 - DNA, 149172 bp, synthetic construct
  variation 1..149172: note = n is a, c, g or t
  variation 148933: note = n is a, c, g or t
  variation 148940: note = n is a, c, g or t
  variation 148944: note = n is a, c, g or t
  variation 148947: note = n is a, c, g or t
  variation 148953: note = n is a, c, g or t
  variation 148959: note = n is a, c, g or t
  variation 148961: note = n is a, c, g or t
  variation 148969: note = n is a, c, g or t
  variation 148971: note = n is a, c, g or t
  variation 148979: note = n is a, c, g or t
  variation 148981: note = n is a, c, g or t
  variation 148986: note = n is a, c, g or t
  variation 148990: note = n is a, c, g or t
  variation 148992: note = n is a, c, g or t
  variation 149000: note = n is a, c, g or t
  variation 149003: note = n is a, c, g or t
  variation 149009: note = n is a, c, g or t
  variation 149014: note = n is a, c, g or t
  variation 149020: note = n is a, c, g or t
  variation 149026: note = n is a, c, g or t
  variation 149033: note = n is a, c, g or t
  variation 149039: note = n is a, c, g or t
  variation 149047: note = n is a, c, g or t
  variation 149050: note = n is a, c, g or t
  variation 149063: note = n is a, c, g or t
  variation 149065: note = n is a, c, g or t
  variation 149070: note = n is a, c, g or t
  variation 149072: note = n is a, c, g or t
  variation 149074..149076: note = n is a, c, g or t
  variation 149078: note = n is a, c, g or t
  variation 149082: note = n is a, c, g or t
  variation 149084: note = n is a, c, g or t
  variation 149089: note = n is a, c, g or t
  variation 149093: note = n is a, c, g or t
  variation 149095: note = n is a, c, g or t
  variation 149098: note = n is a, c, g or t
  variation 149100: note = n is a, c, g or t
  variation 149102: note = n is a, c, g or t
  variation 149104: note = n is a, c, g or t
  variation 149106: note = n is a, c, g or t
  variation 149108: note = n is a, c, g or t
  variation 149113: note = n is a, c, g or t
  variation 149115: note = n is a, c, g or t
  variation 149120: note = n is a, c, g or t
  variation 149122: note = n is a, c, g or t
  variation 149124: note = n is a, c, g or t
  variation 149126: note = n is a, c, g or t
  variation 149130: note = n is a, c, g or t
  variation 149133: note = n is a, c, g or t
  variation 149136: note = n is a, c, g or t
  variation 149140: note = n is a, c, g or t
  variation 149148: note = n is a, c, g or t
  variation 149152: note = n is a, c, g or t
  variation 149154: note = n is a, c, g or t
  variation 149158: note = n is a, c, g or t
  variation 149160: note = n is a, c, g or t
  variation 149169: note = n is a, c, g or t
  variation 149172: note = n is a, c, g or t
  source 1..149172: mol_type = other DNA
ctggccgtcgacatttaggtgacactatagaaggatccgcggaattctacagatattctctcactgagagacaagaataactgacttatccaggctgcaagtctggtgcttgttctatttgatagtctgatgctgtaagttttttgtcacaaactctgaagagtaaagtggaaactttgactttttgcttctgattgcagatttctatccaaagagggagttgagggaaatgcttcctgttgtcctaattacacagtactaagtgaacactggatatggagtcagaagggaaagtagacttgtgagcccatcacatatggagaaaacacttttggttcccattgttggcagggacagggaggcaggccatgttgcctttcacaaaaaaaaaaaaaaaaaaaaaaaattctgctaccatccctgggagctattgttagaaggtcatgttcaacaaactcgcaaagtgttttcttgattgttgtttgtgtcaccattactcaacgttgtgtagaatgtagtcaggtgatattatccccaattttataccgagacttattttaggtggattatatgactcagtcagaatcgcatcaaagcagaaccagaaccaagtttgttttcaactccagtgcttctttccgaagttttatttccattgtcagccacttaactattttaaaacgtatcttttggaatagggatctctcaataggaatccacagcaaagatgaagagaaaactagatcagttgccttggcaattttgtccactcagaccaggacattcagggatttctagattgaatttgtgtttccttctgactacattgttgaaatgatctggatcatctcctaatcttgctcttggactctctaggtgtattctcagtgtctgtgagggagggcatgtgttttaagcagtaaattcctaaaggcctgtggaggcccaaggccatgcacactgagggagttgtggatcaagtggcatgatgggcccagtctatttctggcagagctgttattttagctgttattctctttggccagttatctcccttagagtagtgcctctttaaatgctttttcatttggtgaaatctaaaaatttgtctctaaaaggcatgctgccaggcctcttttcatattaaagtggtcatctccacattgtagatagtaaatcatgttcaaagaaaagaccttaaaaattcttcatattgccttgcagaaatcacagtattttagatgtgttggggagcttcacaatcactcagtttaacccattcatgttacagacagggaaactgaggcctggtgactttcccagttattaacaaggtagtgactgagaagggacttcagttcgctgtttttaatgactgtatagtgagcatctgatgtttggtcttctacagaaagggaacagagttgactaaagtgaaaataccctagttcagacatcagaggcaaaaaaattaatcataatcacaacagcaccttacagttgtggagtcctttatagtttttagactcttagacacagagaaatagagaaatataaatatggaaaataaggtttatttgatattttatgaaatggaaccctaattcaccaacatttttacccctttatagtactgcaataatttgttgtgagactctgaaatcgtttctgaattatcagaggaagaaaatcatttaaaaaaggaaaccagagctactggctctatcttacttcggtcatggtcttttaaaatctattcaatttattttaactagactaattcattcttaaagtaagtcagctaacatggaattttctgaggttacttaaaaaattttggaaatttccttagctctgcatgaagtatttttatctcttcttcttcttttttttctaaagaaatagtgtttgtgggtcttgataactgcccacaacagattttatatcatctggttttgatagagcaagggggtctaatgaatgattgaaactaacatttataaaatctttcaaatttgagaggcaggttcttggaagaaggaggatacaacagaatggcctctgtgtcactggtaggactctgaagacaggacttactgcctatgttccgacatgaagaaacagactagtgaagtatgttgtcaaaactttgagaattgtaaagcaatgttcacatgtaggttgataaaaataacagaagaagttatgttaacctaggtccgaccctaggtgctgtcatgttgtcactaccttcataataagcttcaaagaggtgctctgttattatctttaaaaattacagacgaggaaactaaggtttagacagtgttagtaacttgctcagggccagtcactcaatgtgtggcagagctggattccaagtcagtgctgtctggctctaaagcttagattcttttcattgcacttttattattaaaccaaagaacttatgattaaaatattttctgctttccttgacgatttatttcaagatctaaccatttctttttcctggacattctgagcagggagcactagctctcaacttccctgcctctaccctctggctgggctgcaccttctcctgctgcctgttcctcctgcttcatcagcacacagtgggactatacattagccagggtgttagacaggccctccctggaccttgtcttactttcccccttgtgttatgaggacaagctctgtagtaactacattgagaatcttaggagcaaaggctccccacccccatgggggcacgtcagtgacatttggctcctccattttgcttaagaaacctgtgaccagaccctcaccccaggcccatagtgagaaaagcctgttttcatttcttctttcaccaagcccatctggatagagcaggtgcagggctaggctcttaaaatagaagcccttgtttcatgtgacgtggcacggtggaaactcccttgcttccttgcctgttgatcagattaatgaaatgatgaaggtctctcccctcatcgtggtgttttcttgacttcctgtcattgtcagttgacctttctagtttcttcatttgtaaaatacaggacttgttcttcataacctcaagggtccctcctatctttgataatctgtctccatgcttccgattaggggtcagattttggaatttaccatttctatcttgtttatttctcccagcaatattattccagcaggaatagctgggactaaaacttattcttggttaaagcacatcatctcaccatcttgacatcccatttgctctataccatcaaccatctctgaccctgaaccccagtctccttctttgtaatttaggaataataataccttattcatggtgtgaatcatatgagagagaggatttaacattgcttagcaagtgatacacattaggcattcagacaatgcttgttcacttggggtcaaataataaggtccattttctcttcatgacttctagctattgattagctttgaggctgaaaaataagtttaagatgggccctctgacctcaagaggctagcaatattttatcttctttttaacgctatctcctataggaaggaaagctagcaatattttggataagacaaaataaatacatatgaaacagagaatggattaagtctggaaaatccttccagtgctacacctaggacaaggtaccccatgcagagcaggtaaattcttaaaaggatggtctctgagtcaaattttggagagtgaagtgccagcatagctgatcatcctaagaaaaagtcaagaccgcaagttatgggttccaacagtggagaaaaggctaaggaaattatgcactgttagtaagatagaatgatgtgcaccattcaaaatggtcaatatgatgcataagtagaaaaaaagaagtgctgtgaaacaacagcaagtgaaagaatttgaacacaaaattctagtaatagtgtcaatggctatgtatgaagatactcagataaatgttagaaaagaatataatgtgggaaatgaaaataatagatgtgttagggttatgggtttttggatgaatttcaaaaacattccttttattaggctttcacttcttaagtcaaacattttgaaaaatttcacattgtatgacttggattgcataatataccagttcctgggctaaggttccatctttctctggggcaggatttcctctctggttttcatcgtgatctctgcctttgaatggcttgctttttcttttaagagaaaaaagtatgacaaatccagtaggtgatggaatcctctctcttccatttatatttctgtggatcttccttctcaaattgcctataacttcatattgaatctgaagaaagggagagtttctaggagccctgatataagggctcagggatttgtgctgccatttctttagaaaatgcctgattttcccaagaatgggtcagctctaatggaggtacctattccttcaaggaaaagcagtcaacttagcaaacaggtaattccagaggtgatttacgttttactttggcagatggagccttcattttcaatagaactccctgtgaacttcctttaaaagtgttttgacttttctggaacacatggactccatgcagtgacgtgcccggtaggcagtaatgcatacttagggctggccttccacagcttgagtaggtgggttccctttaaatgaaacaatctgaagagatgcaacacaactgtgacccttggtggtcttccagcttttaatctgattcaggccactcatttcaaccctatgcaagccaatttgacgcaaatgagtccaatctaaccagtccaaaaaatacttgggtgtttgtgccaataaatctaacgatcaaatcattcccccttgaattagaagttaacaagacaggatagctcatactgccctctagtcattcctgccaccattaagaagcctggggctctttcttaccccatgtgccaacttctcagggcctccttgtctaattttgcttgagaatgtagagtagaggaaggagaaatggacagacagcctagagaagtgacttacagtctgggttcagctctaactactaatagtgttgaggacgtcagtcagcttctcgaagtctcagtctccatatttgttaaaataaagagggtagtctggtttttctggccccttctctcctgtcctcctagactatgaattcatttttagctttttaatgcaaatttttgattcattagaatctagcttcttcactctgccacttttagttggctcttcttagagcattagtgcccaatttgcactgttagaattttcccttgtttgtacccttcaaaatttttctttttttgggcaaggattgtatttttttctttttaactggctccttgaggatagatgttgtgatatctgtgtgcttgtatgtcctcaactgtgccctgcactgttagggcccttgtcaaaacaacacatttctcagtgattctgagactctttctcttatctatagaagtcataactcaagagtaaaatcataccaatattttacataaaccctagaatttttatagatctattatttctttttagagtacatattggaagtaacttcacaaggaacattttctttacttttttttttggaaaaaagatttatgcttataaccaaatgaggttgtttggcaaatttgtctggagagacacacacactcagggcaaataggcactcctttcctgggcaactcaattacctcttgcctctggtcaaaccactccacaaataaagtggactgatcctcttgactctatgtgtaagtgcccattgtgtgtgcacagagctggtgagaacggccatggtgctaggtgggggtggtgttggtggagttggactagattatctgggatcatgcgaaatggaaattcatttctagctggctggcttcagaaggtgccatctcctatttttatatgaagcgtgctttggaactcagggcaacgaagggtgggtgtgctgcacaaggacagcagaagagtgagctgactggtccctgaaatcgcagttggaaagtggattaccagtgcagtagaactcttcacggaggcctggaccatcaggtctaatggtgttgttccaggtgggtggtcatgtggagcaaaaatatttgaaatcagcgagcacgtacctgagagatgacttttccacttgggctagtctcttgatatttctggtcctgtttcttcatctgtaaactgggttagtaatgtcacactctgtgagttggtgcatccagataacaaacaaacaaacccacacacagaaaaacaatccccataaatgccctataaacttatattaatcatcaacaattcatttatttgttcactcacttatttattcaacaaatactcgtatgaccaaagcactgtgctttgtgctaagctctacaataaatatagaattgtataaagatcaaggagtaaaaatcctagttcaggtcctcaataaatgataggtgaatcatagactgaaacgtggaagtaaagtaaggaggtcttccacgactattgtgatcttcaaatgttcttttgggtgcagagtttccccgggaaactgccagtttctataatggacaaaagactttgcttttcaggagtatatattttgataggaaataaagatagaaatacttggaacttagacaaattaaatacataaatgatggatagtatgtagggaatacagtactgtggggaatcaaagagagggtgaattctgggtgaaatcaggagggtttctcattattcacagatgatctcttacaggaggtgggaatttttaggtcagctggaaatggaaccaggctttcatgttcagatatacttgcagataaacaactcataagaattataagactaacagcttcgttagtttacatttgacaatttatttgtgcctcattattttgggatgtgtcaagaatctgataacatgggtgataatgctatttgccactgtaatatcaggtagtcctagtgaaaatgcaacttttaagaacttgtttaattgtatctaccaactcttactgcagaatgtagacttgaaagaagcacattcctttttcttacataatcattaggggttactacatttctgagcaacaaggctcaagagtttccaatggaaatgtaatttcaattagaaaaccaaattgaggttgagggtggagagagccagctgcagaaggtatctggacagcagcatgtatctgcaggcctgcgtgtgtgccagggtgggggcaaggaggggtagattgtgtcattttccacatatgtttatttagcttctcctgtttcagggactttgggttttattaatagtcaatttaggatattgtgcctccatcctcaagcattgtcaatcttaaaaggatgggtgggagtggtaggcattaagcctcagaatcttctagccctttggctggagtggttctgtctgctattgctgcaacctgaggaaatctttcaaattctgggtgggctgctctggttaatatagtggagactctaacaaaaattatgtcatccagcaatagagctctggtgcagtgagtggcagactaactgatgaacatctcaatgcacagcaattctcagcagccctcagccagggcactcctagggagggcctctggttacaatgctcttcagagcctgcccagtctgtctctgtttctctgtcttttctttcctttctcattattcccatcactattattgtttctctttctctaaggtctgtatattatcctttcccctagttctttgaaaaatttacttcagttgcacacacaatagaattaaatgataaacatcaattttctaaataaaatgctgtgtacacccacactcacacccacagagtattttctatttcttaacaacaacaagaaaaacaacaaaatgcatagtaagaattaaaaaatctggaggaatattgaaggccagggcagattatttgtttagattagtgatccttaacccagaatttcctcacatctagattattgtctggtggatgacaaaggaaaatatatattggaaacccagttgtggatccttgagaatacagtagaaagaacagtgaaaattgaaagggaaaaggtgagaaaaccttcttattcatgtccaggaacagaattgggcttgaatttggtggctgcagctctgaacggactcaaagtgagtgtctgtaaatcctgctcagcaacacgaggacaggggttgccatgtcctcctcttccttatgtaccttccctcatctgcctccctatctctagcacatggaccaggggctcataaatgtctgtaggatggaaaaatctaggaatacatgtggggtcagaagttgtaagagattgggttgaatatattctgattccccaagttgtttttgtctacttattttctttttcttctctgtgatggttctttttttcttgttatttgtatctttgcacaatgaaagacaaaaaaaaaaatagttctagtcactagaggacttcagtaaacatgctatcacttacctgcttatgaaccaagaggttgggaaggcaggtctcagttggcatgtagcccgagaagagtttgtcacatcttagagtctagaacctcctttcccacagagatacaaaacacacagttaactcactggtattttggctgggaagatagctgaatgatagcaccactttaaatcatatagtgatgactgctgctgatgatgcacatttcttttcagtatgaaatattagttttttgggaaatccaatgttcaccctaatcttgcagcattttgtaatttccatcatggcactgagcaggaggcaggatgggctgaagggaaatacactgaactgaactggatccttaggcctgtgggtgagacacagtattggcagatagtgccttcaccttgtggctcagtttcttcaggtttcaaaattgagagacttttttcacttttacatgttaagtaggtaaggatgaacggaaggattgtgatgtattgcatattggaagaaacaaaggtatcaggtcaaaattaagaagggtttatttgtggaattactgcagggagaatatccactgagctcagccattgaactcaagaacctgttagtaattaagaatatgaaaagattgtgaattgagcaccttctctgcaccatgccccgtacaaagtggattatacacaatatttcatttgctgttcacagtgatgttgacatagaggtttattgttattgctttattataaacaagtaaccccaaacaaagaggggataaaaaagtgatagattcccatgtgagagctcactaacccatggtatcccaatcagagggctagagcattggaatgacgtgtgaagacactgttgatgttaggtaattcccaggttggttaatgtttgggcaggaggggtataacttctctggcctccaatatgtgttaggcaccccttctgtgtgcttacgtagagctctgtaggcactcctctcagctccatttctccatgttgcaatttctggttatttgtttatacactactctaggagctccttgaggtagagagttctgtcttgttgactatgttatctgcaaatcttcatagagagccaggtacatggaaatgctaatacatttctatggaattagtgaaggtggacattcatacgtccaggcatatgaacaggtttttctctggagttggtgttgtttggtgtagaagggctgtcaatgagccttatgacttgaggaaggatcaacagatgggtggatagaagtacagatggttatatgcatggatggaaagggaatatggtagaagagaatgcttctgtcatgggctctaggaagtttactgaaatatattctgaaaggttgatatgtatagttcatccttattcttcccagcctctcttttctgagatgaccaaactattcaacataaatggtttcctgctgctcttaaatatttccaggacacttctgggtctcctgaagcacctgcttgctcacagcttcattctcacgtgaagtctgcataggtcctgttaccatatcagaactcttagaggacacttattctgggctgaggttttccaaggtgagaactccaggactggagatggagcagtgcatttaggtgaagtgatatcaaacaaggttggggttggtgttacttcccatcccagtgctggacacagccttggccaggtcctgttgtgaccccaggtgcacggggccttgggaacttctgaaagggtgtggagtgctccacccagccctgttggaggaggatgggagcgaaagcaacagatgtgctcaaggttctgttttcagttccccaaagggtcttctccttgaccaaagcagtgtgacggttgctatgacagttgctatcttggtccctgggactctccctcataaggtagcattactttttttaatcttctcaggcaagtaaccatgaaactctgtaataaccagtctgaggtggggctggttgggggcatgtttgggcctgagtactgggatgtgatggtggaatatgctggggtaccaagaggtacctttgattaatgagttatttttccaaattagaccaacactcctcctagttgtcttaggcttgatgactctccatttctgcagaagttcagaattcttcccttgagatgtctgcaattagttcattgttgcaaattataaaaacataacaggtagaaagaacactgaccttgaatctcaaatctgtctctaccaggtcatgtcattcagtctctgcttgggtcttctcatgtgttaaatgagagctttgatttccaagctccttttcactctgagagtcactgatgttttgcctctgaaaatggcaaccatgaagagtagttactgagaaaccagcactgtgttttagagttagggctcttgatcaggctgcctcattttgaatcctgatttgggaatttctgatgatgtgatcttggacatggtattgactttctctaagtcttagtttttttttttttttttatctgcaaaagagggtaaaacaagctaccccagaggctgctggaagattcagtgacatgttgcttgtcagtgttgagacattgtatccattacaactatcatagaataaaaacctgttacaagttggcatgggccgagctgccagcaatttcatacatctcttttatgcctattttgtttttcattttgatcatcaatattttaatggtgtgtcataaattgggggctctttcttatttgttcttggacccatggtgaaataaaagcttgtatatttttttagaaggattcatagagatgaaaggcccttactgaacattcagtctgaccttattagttttaaaggagctgactgagacctaactgttattattacaaactgatattattggaaaccaacacagaacctaccatgtgcaaaactgtgggaaaggcttggaagtctgggtttgacaacctgagtttaaatagtgattctttgtcttactagctccgtaatcccaaacacgtaatgcaatctttcttagtctgtttcttcatctatgagacagggctaatgagaaacatctcagtgtatggtatgacagcaaagggggtcatacaggtgacagtgctagcaaatgtcagtcccctcctcttctctacctcccaactcccttgaccctctcctctgtcatcccttttctggctgcgtgcagagaatcttgctagctttagggatacaaaaggttccagagttgggagacagactgttctcatacagagatcaataaccacatgatatgggtagtaagggccattcagatcctgagaagagtttggcaggtcaatggagggtggaaaggatgagaggaactggggagagagacagagaagagggaaggaaaaggaagggagaaaagaggacattgtgtatctgagaacaggaaaggagcaagtggaatggaagaaggagagggaaggcagcaggtgagggcatgtctgttggggtgtttatggagggttttttcagggaaagggtctgcaaatggagccaacaagaaaggaactggcaggtggtcaggatgtcctcctgtgagagtcactcttctccccatcctctctcctcttagcttcaccctcgctagaacttttccttgctcatttcaattttcaagattttcccaagcttctaaacctacaaaatctaagcgacacacatttactggagaaatcacaaacagatcccagccctcctgtggacctctctgcatctgtgccctggatacctctttctcctttgtttctgtggatgaaacatctgtgttcctagctgaggatgatacctctacctgtcttcacccacccttctcacctactcaggaacattgctccagcaatttctcttctctcctcttcagcaccagcttttccctttctaccaaatcattcttatcagcacttaaaaatgctgtcgtttctctccatttaaaataaaccctcacctgtgtatcatgtagaactatcaataagaaaaatattaaaaaataagaaaataaagaaaaaagataaaatatatcctctgtagagcccctttgtccttccagtgaccacctcatttctctccttccctcttctaattctctccttgaaagcattgtccatgcatgctctctccaatttcttcgctctcattctcttttgaacccatttggatcagacttttgcccctggcattctatagaaactgcacttgtctagttcaccagtgattcccaatatggctaaatccaatggcccatttccattcctaatcttggttgacttgtcatcagcaattgacacagttgatccattttttcctctttgtaacatttttcctcttggatcctaggataacaacactgtcctgtttttttcatctccttctctagccagtctatttcaatcttcttttctggttcctcctcatcttgctgacttctttacgttggagtgcctcctggctcagtgcttggatttcttttttggtatgtcgttgctaggtactctctcccagtctgatggctttttacaccatgtgtgtggtgatgacatcacgtttgtgtctccagcactgacctcttgcttctgaattctagactcttatagccagttgtccatctgacatctccactttgttgtctaatagacatctcagactcaacgtacccaaaacagagctcctaaagcttcaggaatcgagactgtgtctattgacataaggataataaaattgattaggggaattaaataaaatagaaatagaccaaacttacattgtcatttgatttccaacaaaagcaccaaagcaatctaatgggaaagaaaagtctttacacgaatagtgctggaattttcagcagctcatgaaatgtatatatattttatgaaaaaaagtaaaaataaaagtaaaaaatggtgctggaacagctgcacatccacatggaaaaaatgaaccttgacccttacctcatgctatacacaaaaattaattccaggtgaattaaagttgagctcccaaacctatgcctatgttctatagacttcttcatttcagttaaggcaactctatccttccaattcatcaggctgaaaaccctggattcccccttcagttttctctcttccccacatcaacactagcagtgcttcctggcagggctactttcaaagtagcttcatctcctgcttggattatgtaacaggctcccaactggggtttccacacatcttcctatcccaccctggatgggttattctcatcagatcacccagagaaatcctgtttatgtatgtcagatgatattattattatttttattatttttgagacagggtctcactctgtctctcaggctgcagtacagtagcacgatcacagcttactgcagcctccacctccctgggctccctacctcagcctcccaagtagctaggactacaggcacacaccaccacgcctggctaattgtttgtataatattttttgtagagacagggtttccccatgttgcctagtctggtctcaaactccacccacctcagcctccctaagtgctgggattactggcgtgagccaccgtctccggcctcaatattattattttgctcaaagcctaccagcctcatctcacttaaaagaaatgcttcctgtgacccacaaaacccgacatgacctgccctccctataaccctgtgtcatgagcactccgggcacatgcccacctcagggctttttatttgcagttcctgctgtgctcttacctatttatccacatggtttacttcccacttcatttaaatctttacctgaatgctaccttcttagtgacacctttcctgatgaccctgtcaaaacttataaccctcctccaacaattcctgcccttgctttaatgctctgtttaccccgtcgttatctaaaatactatattttaaaatttatcaatctttatcatttatctccccagctagactataagcttcacaaaggcagggagttttacctgtgtgatagcctcaggatcaaagacagtacctggcacatttcaggcattcaatacatacttactgaatgaaagaataaagtgtggccaggcgcggtggctcacacctgtaatcccagcactttgggagactgaggtgggtggatcatctgtggtcaggagtttgaggccagcctgacgaacatggtgaaaccctgtctccactaaaaatacaaaattaaccgggcatagtggcacatgcttgtaatcccagctactcaggaggctgaggcaggagaatcacttgaacctgggaggcagaggttgcagtgagctgagattgcaccattgcactccagcgtggacaacaagagcaaaactccatctcaaaaaaaaaaaaaaaaaagactaaattgtgattgaggtttacagatgactggtcagtgtttcccatatccccaaactgttttcctgcttgatgctattatttcatggggcaagttcaatttccttatccattgcttgactgtccaattagattggcagagcgttaatggcaaggactgtgtatcttatcttgtactgttctatatcctccactattgctgccattgtgagggggaacaagggagtggcttccctccatccagttccctacatcatatgtcatatcatacaaatatattagtatttataaatatattaggtctacctccttctctgtgcaaaatatgtcatatcaatgtctgagttctagtatgttcatattcttgggcaattatgtaattatggcttatgttgtcataacttctatgcccgtatttataagaaaaaaatattgagagcatttccaggaaaataattgactggaagaagagagagtggtaaaaaggaattaatagtgagctaactatcagtatatacaagcccagccttctaggatctggataacccgaagcaagaatttctctgtcagttttctcatctgtataatggtgagagtgggggtgttgaagtagaaaaatcctttgattaatatttattctaatccttgactaggtgctcagtgttagtccagggaactctatcttatttcttcatgggccagcttaatgtcaagatccaaaactcttgtgtaaagcttgggaccattttcaaggatacatttagtagtttacaataatctagataacactgactgatagaaatatgcaggaaatacagaaaattataatgtgatccacatatataatttagaagttttcactagccatgttataaaagtaaaaagaaatctgtgcaatcaattttaataatatttttgtttgcacacaagatatacagggtaatctcaacatgtaatcatataaaatattaatattttacacgtattttttgtacaaaatgttaaaaattggatgtgtttttacacgtatagcccatcttagtatggactggccttatctccagagctcaataactctgtgtggctagtggcaggatattggatatcaagtctagaacatacgtgaattaattcaaggttcaagcacattaaggctgaaagagttatgactgaagaacaagttcaaggaggaaatcaaacaatagccaaatttcactgagctactccttccattactaatgataacaaatatttatagatcccttagtatatactaggcctgatgcttagaactttatatgaactgtttcatttaatcctcacagcaatcttacaagtaagacctccaccccctttcagatgagaaaactgaagcacaaaagtgcagtaacttgctattatgacttgtgagcatattttcccaggcaattatatgcacagtatgatgtaggtaaagcagcccaataatttattcactatatttctccatgctcatggtaaggactgacttgatccctggtggtcacccacttgtgctccctcagtgagggaagggctgcagagcccctggcccgtgtcctagtgactcaggcttgggatctccagcagctgctatggttgacaatttagtttagtaaaatgttagatcctaccctgataactgttataaaaaatcctccttccccttccccagcacaggtacccagcccaaggggcactttctatggaaagatgaaaagaactgacatggacttgagctcactgggggtgcaggtttcaagaaagaacaaagagagctgttaggttgaagagacgcagttgaagagttaagtcttggaattgttaatacctggaacaaggcacggtgtgaaaagacaaagaaacacacaaacatcaatctgtcctcctcttttctctttctgtttcatttcttatcctccatcagtcagactttgcttcctctttctcctccttcacctcctcctccctgcccttcccaatttctttctatcttccatttattgttcttccaaaattcgtatactcatcctctcttctccctttctcttttctccaaaataatatgttcaacttactgacttgctcagggacttgtgggggcgaatgtattagcaccaaacctaggaaacatggcgaattctaaaaacttgttctcatagaaaaaagagttaaaaatagaaagctacagtccagttttgaagccacagaagacctcactctgatgtatagacattagagtcagaaaaagactttgaaaagaccagtgaagctccttgtcccacagacagtgtgagggagggacaaggggaattgtgtgcccaagcgtacttgggatggtgtaggtggctgataagagtgtcagtggaggtggtggttagcatttggagtgccccaatcttgtgacactaaacatttattgttatactaaccccactgccaactaccaggaagttttcatttttcttactgtgtcttagtctccatggcatctataaactgttttcccccaatgtccaggcatcattcctctcccacagttgatgtctggctctgtgccatgggtgtgggcctgcctcttctctctcagaatgactgctgtttcatgcttggtgagccacgcagtatgccaagctgctgtctctgacctggagaaaggatacccatcctaccacaggtggggcatatcatgggatggccttcctggttttccttggcagacacatttttctcacttttttttttctctcctcccttctctttttccctccctctttgatttcttctcttttccttttctttctcttgcctcacttctgccctagatctaccatgggacccagggagctttggagccatgcaacccacagtgtgctaagctttttactcatgctatttcttttaatcttcacaattctttacctatcaggcattaccatcagatctgcaccttacaggtgagaaagggaggcccacaccgattaagaaatgtgctcagggccacacagcctgtacatgtcagagtaagggcattctcatgccaaggttcattttcagagccaaaagcataccacgtctcaggagaagcaggctagatctcttgtctgcttggcttttaactcatgctgacctgaactttctggatttgagtaactctcagacctgtggagcccgatttctgtgagtggattttgccagccacctggggaggtgaacccttgctggggtatggctcatcagtgtagaagggagttccttcagaggtacgctgtcttctcggccatccccattgtagtagtttcttgggtctgccctaacaaagtaccacaaactaagagccgtaaaacaacagaagtttattctgtcataggtctggagacagaaatctgaattcaaggcacaggcagagttagtgtcttctgcaggttctcggggagaaaccatcccacacctctccagcttctggtggctcccagcaatccttggtgctctttggctctcagctgcatccctctggtctctgcctccttggtcatgtggctttcttcctatgtgtcactgcatctccaatctccttcttcttataaggacaccagtcattggatttagggcccactcggatccagcataaaaaaaaagtttaaaaaaattatttggaaataattatagattcacagaaagtagcaaagacaggatataaagcacagaggtctgatgtgtcctgcacccagtttctcctgttggttacttcttacgtaattacagtacgatattaaaaccaagaatttgacattgataaaataagtgtgtacagttctatgtcattttatcacatgtctagatgcctgcaactaccactgcaatcaagatacagatttatcccatgatcacaaagatctccctttatagtttcgcctactcttctttctccaccaccctaacccctggcaaccagaatctgttctctatccctataattttgtcacttcaacaatgttacataaaaggaatcacatggtatgtgaccctttcagattggcttttttcactcagtagaaagtccttcagaatcactccagttctctgtatcaacacttcgttcctttttattgcctcatagcattctatggcatggatatattacaatttgttaggctagttgcctattgagggatgggttggctctttctagctttggctacaacaaataaagctgctgtgaacaatcatgtatgggttctgtgtggacataagtttttatttcctgggggtaaattcccaaggagtacaattcctgggtcatatggtaggtgtcttttgtttagtttttcaagaaactgacaactattttctagagtagctatacccttttatattcccaccagcaatatatgaatgatccattttcaccgcatcctcacaaacatttcagtatgacctaattttgacttgattacctctgcaaagaccctatttccaaataaagtcacatttatgtgacccatttatgagtaccaagagcaaggagttgagcatacctttttgaaggacacaattccacctgcagcacctgtcttcacttgcttaggttatgggtgggtttcccttcagagtgttatcttctgagaagaaggtttgaattcatagctggattatgcctgcctttgattgttcaatttggcccccagggatgagtgagcaagttcatgtcattggaagggacattactgagtctcacccctactcaaacctccaaagtttgaaagatttgatactcatcaacattctcaagaggcagaagggcaaggtgcttccttatgtagtttctccatgactgtccttccccactttcccagtactgactggaaagaaaaacaaagcaggacaaagggattgtcagtcatttgagggaagggatgctgtgttagttactcctgaaccccttcagagtgtaggcagagagaggtacttagaaaggtgtgttggatggatgagtagctgagaggggcagggccagagtgccccatagaatgaggaagagtcctcatttacatgtgcccttcccccttcccaaacatgtgagtgttcatacatgggtttccagtgtctgggcaaggttaattctgtcctctgtccccttgctgaaggtctgtttcatttaatttctatgtatgtgtgctcctagctagccaaacagggcacagatgccaggaaaatagcaggcctgttgttttgttgagcaccttgagccctggaaggcagactcattcagggctcaagagggcaggattaggcaggtagctatttgatcccaggcccccccacttaccagctgcgtggtcttgacctattacttattcctcttctatctattaactgggtataagatgttctttatgtgaagttattttgaagcataatgtgtatacagaacagtgcacagatcataactgcacaaccccacacgaggaacagaacattaccaagaccccagaagccccttcttgtcttctcccaggcactaactcgcccacccccagctaagagtaatttccatccaaatttctaactttatttttacctggttttgaactttatatggatgaaaacatacagaacatatcttttgcattgagtttctcttatgtaacattatttttatgagattcatctgtgtgagtaggtatagttgtagcttgttaattctcctcattgggtattctaatgtataaacataccacagtttaataactcattctattgttggacaatcgggctatttccaatttttggcttttgtaaataaagctgctttgaacattcttgcatagttttttggtgggtggggacactcagtcatctagaagtgggattgctgagttatagaatatatttgtctctcagctttatagaacctttgcaacattttaatgaatgtttttaatctcacagtatagtgtggattaaattaggttgtggaaagtactcaatacggcccttggcagacaggagtccctcagtacctgtttaaaaatgtaaataaggcatgacattccattaagtctaagtaccatgatgaacttaaacatttccctattgtttgtttatttaattgcttttattgtgttgttattttatatcatgttgcaatgaatgattctctttatagcaggtttcttcttttgaaaaatttgctttggttgattctcagggaattgaatcaaaggatatatgactgtaagacctgtcacccttaaaaaggactatgagggcttgctgaggaggggaaaacaaggaagcaagtctctcctaccatggcccaggggactgtgaggacagaaggcttgtgggtttgagggaggactgtcttgcagaggatgatagggtaaaatagaatgaaggatgatttttataaatggttatgcgccttaggatgactacatatttagtcccttataagagaaattgagtagttggtaaaacaacagataataattattaaatgaggaaagagagaaaccacaggtgcaaagattcactttatttattcattctcctccaacattagcataattaaagccaaggaggaggaggggggtgaggtgaaagatgagctggaggaccgcaataggggtaggtcccctgtggaaaaagggtcagaggccaaaggatgggagggggtcaggctggaactgaggagcaggtgggggcacttctccctctaacactctcccctgttgaagctctttgtgacgggcgagctcaggccctgatgggtgacttcgcaggcgtagactttgtgtttctcgtagtctgctttgctcagcgtcagggtgctgctgaggctgtaggtgctgtccttgctgtcctgctctgtgacactctcctgggagttacccgattggagggcgttatccaccttccactgtactttggcctctctgggatagaagttattcagcaggcacacaacagaggcagttccagatttcaactgctcatcagatggcgggaagatgaagacagatggtgcagccacagttcctgaggaaagaagcaaacaggatggtgtttaagtaacaaagttctgcccttgggtgtgttgtttgcggataatcacagggcatgttagggacagacagaaaacagcatgcttatcccagataattatagcaaggagaccaagaagcgtatttaaaatcttgatgttttgagtttcttcctagcttccccctattccttaataaagttctaaattgttttgttggagctctttgcagccattctgagggctttgcatgcttttctgaccttgcagtaaactcaatgctttaggcaaagaatggccacgtcatccgaccccctcagagtttagaattcagaacaggtctgaagaagaccaggcagcggctgagtcaaggaaagcctccgtccgcttttatttcccctgtgcctcttccaggactgtgctgggataacaggctcccgggggttactttggctgggctgggctaaaacctccctgcagagcaggccctgagccctgcctctgcgcctgggtggtgtcagcccctccaccttctgactgttccagcaactctctaagccctcccaaaggcctcaaggcctgtaaccatatgcagcaattttcagccataccaggagaggtcaactgtaatcttggccacctgcctaagaggaagtggctagcttcacttctgaccctcagcaactgccaggtggcctcttggaaatccccctctgggggattccacccgttgggtgggagagcagtagttaaaatgtaaaataagaatcttttgctgggagaagtcaacagatagggagaagtcagctgataacagaaatagttttttttttttttaaaactaacttcactgttaaccaagcagttcaacatgaaagactgaatctcttatgtttaatattttcttctcttttaatcttcataactaatttttttcagataattgtataaaataaccatggtagcaaaataatgtgatcactggaaaataagcagggaaaaacatgctatgaagatactcctatctgggtgaattcttgatagctttacatttttcatctggcatttaaacattaaacagttaatgtatttgacatgaaaattatttcaagttatcttattagttttaatagagtttaaaaagtgtttaaaagagttttcaaaaggctctaaaatcattttgaaatagtttaaaacagttttgaatcgttgtaagttagttttaatagagctttaaaaaggccctaaaatagtcctatcaagttgttgcagaccaaaataatctccttaaatatcacttttgagatcagctggggtaaacgacagcaacacaatgacaaatcattaaactattttagagattatgaaattaaaatactcagattaaaattttcctatcacagaattaaggtactggaaaatatgtttaagtttttattaatcacattgctataggtttagatattttgtacaactgaaataaaatcacacactggcagctacatttttgaaagttaaaaacatggtcacgaatatatcttattttaaaatcagttaatataccttaatggtatttaatgccaaattcaaagtgaattgatcaagccctcagtggccaggtcatgggtgtgatttttactctgaaagaattacatatttctttctttttggttgagcttttgttatttaaatacatttgatgagaggatattgaaataattaaatagcactgaaaaaaaaaaaagctttaaattatttacaatcccctaatggaaattttcactaatgagatatcataatgaatgtgaattttatttctgaaatctctaataaatcagtcttctccctggttttcccagctcagcgcccattacgtttctgttctctttcccttagtggcattatttgtatcactgtgcatcaggaaagctggctacggcagcatcaatcgggcagacacagggtggccacggccactagcggcaaggcggctgccccaagagcgcggtggcatggccaccaaagccactcaatcgagaaagaccgcggctctgtctacagctcgcggtgccacggccttcttggcagaataaaaatgtagacaagtaataacagaggataatgaaagaacatactctttaaaatatttcctatttttttcacagacccacggtcattaaaaaatgcaattatttactttttttcatttaaacacatttctttgagattgagcttttgggaataaccacctttccaccattacaataagagataatttcacgtttagtctaatgtacaaattggatttttaaaaaatgagctctatctgtgaagcccttattcctatagaatgtgtctttttgagtttattacttattacagactctaaaaacaacattgctgctgattttcaagtaagctgcctcttctacatagcaaataggtacacttcacttttccctgatttttcttagggcgtgctattgatttttattgttgtctgacaaaataatttatcaaacaaaagggagaaagactaaaaaatgtatttttccacttttctgtatcatgcataatcagcaacaaccaatacaatatttggcaagagtgaacaaaaataaatttacttttgctccttagaaatacaagggttcctttttagttacactttttttttttactttgtgtcattcagtttagagcaatttaatctttttttctccaaatccatttttgaagctgagtttaacttttgcaacccatggcaaatcttaaatgccctcatttaccaatctttaccaaactcctatttaagcctctaaaagtcaatactggccatcagacccaaatttcagaagacaatagtgaaaaattacttacgtttaatctccagtcgtgtcccttggccgaaggtgatccacagtgttaacttaattactttccccttaacaaaaatctcttttcgctgttaatatcactaacctgaccgatgcagagaaaatcttgcaattgagatgcctcacttaactggctagcgcttggctgttccttaagatgaactaattttctatcccttactcatctgactttttgaaagaatctggtactctttggaattgacctgagctaatatctcaaacacaaaaacgctccaaatttaaaaccttataagaaaaagcattaggaaagtgcacttacgtttgatctccaccttggtccctccgccgaaagtgagccacagtgagggatctcaccctttcccctcaacaaaaacctctcttgaagccaatcatatgagataggctgcttgttcagagaaaaatctagctatttcttccccatttcccccatgaatcctattctcctctcaaacccaatgattcgtctatttgctcagctttttaagttcattttctggtgtcctgctatttacttctgggtcaccaggtttattcaaccaaaatatcacaaaacttgcacaaatgatacaatggcactaaaatctcacgaataattgagacagatgtacttacgtttgatatccactttggtcccagggccgaaagtgaatcacagtgattcgtcttaacttttccctttacaaaaacctccctgaaagctcagcaagcctctttcccccaatgaagttattttgatttagaaatcttaaaaattagccacaagctagcgtcctgtggaacaatttcccctcctctgtacctaacctgggaatgaagtttgttagatccctggcatccgactaatgaaaatccacacaaaggaacacaaagtaaactaattagcaacagtgaagaatcagtggaaaaaagtacttacgtttgatctccagcttggtcccctggccaaaactgcacacacaatggttcctcttaacttccctcctatacaaaaactccctttctgacaattgaccaaggctctgtccagaacatgttatgttccccaggacatttctgaagctattacttagacaagttattctcacccaatgactgaatcttgcttgctcttcaaagaaaatgtgcaatcaattctcgagtttgactacagacttatctttatcttttccctgaaggatatcagaggctgattgcagagtcaccttatagatcacttcatagacacagggaacagaagacacagacaactgaggaagcaaagtttaaattctactcacgtttgatttccaccttggtcccttggccgaacgtccaccacagtgagagctctccattgtcttgctgaacaaaaacccttctcaccaaaggggaacagagtcctgggtcagctgctgaagctcaactcccttttcgagcaggtgtggaaaccctgaggcttctctgacatagcatgtgtttattttcttaggtgagacctaaaatccaagaagagaatatatttacgtctatggcctgatggttcctttctttagcaacttgccacatctggactgcttattatttatttattttttagaaagtagactgaatgttaattacaaagaaaaacaagcaattaaaaaaaatggccagtttttttgtactttcttttggggtgggctgggggggcttttgcaaaggataaacttcatttagtgtaattatggaaatcatcagcttctcaatgagtaataattacaggttgtcttactattttatcttctcctttgctgcaatgttatttaaaaaaaggtagactaaatatatatcaacttaaggctcataactttgaaatgcattttgaaatgtagctccagatggtatacgaaaccaaagtgaagactaatagagtagaaaagtagactttacttggttggtttgtctgttttcacagcacaggaagagctcagctcttactgagctggaccaggcgcatgccatctttggagctgccatggagtcccagtgttccatagtgtttccatagtaatctcatcaacaacactgaagaccttttcagtattttcttttgagtccagctccatttttgcagccttgtatctctcttaaccttccatctccaccccttccatacattactcccacctccctacactccttagagtttttctatggcctccagctttcacaagcactccctctgcttgggaacatctttgtccacctgggttagcttgtgaactgctaattgtctttcaaaattcaactgaagagagaccttctctcagattagccctgagcaggtgacctgaatttacagagtacagagacaggtcactgggcctagagtacctaattattttttattttatttatttattttttttgagacggagtctcgctctgtcgcccaggctggagtgcagtggtgcgatcttggctcactgcaagctccgcctcccgggttcacaccattctcctgcctcagcctcccgactagctgggactaaaggcgcccgccaccacgcctcgctaattttttgtatttttagtagagacggggtttcaccgtgttagccaggatggtctcgatctcctgacctcgtgatccgcccacctcggcctcccaaagtgctgggattacaggcgtgagccaccgcgcccagccgagtgcctgtttatttttacctgctttcagattctcttctacccttctaaattataagctgtttgatgttttatttgccctgtatttgggaggctccgtccagtatctttacttagcaaatgcttaacaaacattttcagaataaataaaaaaaaatacctaattgaaagtcaataatagatcagagatgctatcatagaccaaagactaatactgactgccacaacagtaacttttacaacagaaatcataactacaattctaaagattaggggtaggtttatttgattctgtcactggcagctttgctagttgccttgaatagcagaattagcatttggtctcaccagaagatgaggaaggagagggatcaagttagaggtggagagttaacattggcaagtgaaatttaatgtgcaaaatagctgaccaagggcatagtccttttttaaaggggacacaaagtgattttctctgcagacatacacgcaataccaatcataaagggtgacatttattgagcacttactaagtgccagacattgtacatggatcatcacatttaattattcccaagactctatgaactaggaactaatattatcccctactttgtaggtgcaaaaacttgagggcagagaggtcaaggaactggcttatggcagtaagtggcagagctgtgacctaaactcagatcccatgtttttaactgaactatatgcagattatactccaggagtaaagtcactcaacggaagcaacaagcgtgacagggaatgctgggatgggggaaggtaaaaggaactccttagactgggataagtgtgtacagacgtatgtataagactacacatggaaatattgtttaaagagtgaaaaataactaaaatcctcattaataggagtttggttaaactgtgctagagctttacaatgtagcacaaagcagacattaaggggaagacgtagacttctatatagttacgtggaaggtgtttgtgaaaatgcaggtcactgaagagtatgtgtggtgagatatcatgatcccatctacattgaatatatatgtatataaatacgggctgaattttaaaagacataaattgtgcttggtagttatctcctgggattgcagaggaggaacaatgacactttatgccatctcctcctactcttctgtatggtgatgtgaatatattcattttatagtttttagaaataataaaactgtactaattttgaaaaacagtaaactctgacattgcctattagcattctcgatattcctgtgcaatgcataaacataactttttaaaagatatgtacacacatgtgtgagttttctttgtcaaatacttttctataatctttaaatcaagcatgccaaaaaggtaaaagctttcctgtttcagtgtaggagatagtcgtctgcaaaggaaagagatgtaggggatagaaacaggaatgaaaaagatgactgagctgttcgagggacttatgttcctaagtgagctaattggaaatctaatatgaacagtgcaaccgaataactattgtaaagcagtatttgtaaacaataaaagatgattatcataagtaccattgttgcaaaaactattttattgatcacatgcagtggtgatctgtaggaatgattgttgtgatgtttgctgtaacataaaatgaaacatgggaagtggctgagatctttaggatgtgtgtggttcattttttgaaagcaaatgttgtctcagaagcatctgtgagactctgccaggatccaccgttctacaaaatatctgtgatggacattgataagattgatctgttgaggaaaggcaaggtgtcagtaagatagtctgagagcttcttggatttcatgtaaaagagtgctggaaatagaatttcttggggaacattccaactaactcatcactgaaggtgctttacattgaaccctcagcaaagttagattatcagaaaaaaaatataaactgctgtggaggggacaggaaggaaagtcagggagggaggggggcaaggagagaaagagcgagagagaggagagaaagagagagagagaggagagagagagcacaagtacacacttcaatgcacatctataaatcatcctgaaaactactgataaattattttagcaatgttcctcagatgtaacatttcaagaaatatcatttttgctttttatttggcataatttactagccaatttaggaagttcccctcacatcagtaacatacagtacatcacccagtatgtcagaggacacaatggcataagtttgccttttgcaaggtttgagggatggccatttccctacctgactcaggaaagtctgtagctgatatccatcttcaagtttgtggttctttctctctatatatatatttgagctcagcagtcatgctggagtccagagtaggtgattctttctgctttagcttgactcctccttaagattgtaactctctcagttttacattttttgtcagacgtaagctgacattccacaaggagaggaggaaattctgtggttcacatccagtggtgcttggaacctgattggttgtcattcttccagctagtttgtcacgagtggatatctgtcctggattcccaaggatcaaggctgccccattagccaggaagtagggagatagaggaggtcacttgagaaagagctgcttctttgccgcctccaggttgtgtctgtttcctctcatatctgaagacagatgtgctggcagaagcaaagtcctttgtccggccacgtgcaaatgcatgggacataaatatgaacagagattcttgtcccactctagaaaatgtagatgttcatcttgtttccaaggggacagtaaggctgcaggtgttttttgacttccttgagagaaagagaagatagcagcaattgtatcagggcttactatcctaggaggggttcagccaccgagatttacatattcagtgctgtggtttttgtttcattttgcaagaggaacgagcccctcaagctctgtcttagagttccctgccctccctgtctacctacttggcacccagcccctatgttctcttctcgtattaaggcatagaaatcatgggcaactactgttcaggctggctctggatgaagttgtgaaatcgatgagttggggcttagttttgcagacccccaaatgccctgataatcctggctcgaaggggtgtccagcccctccacacctgtgggtatttctcgtcaggtgggacgagagactgagaaaagaaataagacacagagacaaagtatagagaaggaacagtgggcccaagggaccgtcactcagcatacggaggacccgcgctggcaccggtctctgagttccctcagtatttattgattactattttcactacctcagcaaggggaatgcggcaggagaacagggtgatagtagggagaaggtcagcaagaaaacatgtgagcaaaggaatctgtgtcacaagtaaattcaagggaaggtactatgcctggatgtgcacgtaggccagatttatgcttctctcacccaaacatctcagtgtagtaaagaacaacagagcagcattgccgccagcatatctcgcctccagccacagagcggttttctcctatctcagaatagaacgaatgtacaatcaggttttacactgagacatgccgttcccaggggcatgcaggagacagagggcttcctcttatctcaaccgcaagaggccttcctcttttactaatcctcctcagcgcagacccttcacgggtgtcaggctgggggacggtcagatctttcccatcccgcaaggccatatctcaggctgtctcagtggggagaaaccttggacaatacccagttttcctgggcagaggtccctgcggctttccgcagtgcactgtgcccctagttaatcgagaatggagaatggcgatgacttttaccaagcatactgcctgtaaacatgttgttaacaaggcacattctgcacagccctagatcccttaaatcttgattccatacaacacatgtttctgtgagcacaaggttggggctaaagttacagattaacagcatctcaaggcaaaacaattgttcaggatacagatcaaaatggagtttcttatgtcttccttttctacatagacaaagtaacagtctgatctctcttttccctatcctggctgaggctagagctccaagtctaagaaggaggataggaggcggacaggccaatggaaacaatgaatgaacaacagatggaaacaaggaatagtgtggatttttgagttcattagcgcgtcctccactctttcaaaacctcctttgcaatgacagaagaaatataaaaatgataatgaatttatttcgtggttggagaatcatgagaggtcctattagaagaaaaaactttgaagaacaccacagagatttaaaccatgtcattgaattcatagagaaactggaatttagaaacattttttccattgcaaaaacaggaggcgtccttgaagcagccagttctagttttccccacagagccccagaaaagccgtacttcagagctatcgggctgggaatggtgataggtggacagtggagagtggaataacacctgggtcatctctctgctggttacagacagcttggccctcatgcttcaggccgtgggaatagagattgaaagaaaaagggggcaagttaataggcattcaatagtaatgggatttaaaaaaccctcccaaaccactagaaggaaaagaaatagacaaaaataataaaccaatccagcaaagtttaggaaaagtgaataaaaaattgaggtaagcacgatacataaaagtacaaattaagtttgaaggaccaagtcaaaatatacagtcacaaactattgtgaatgttaaattatttaaaactttaaataatttatctaaaaataaaaataaaccaaaaagatgactatgtatgttttcaaggatatttgattcactagagaaacagttcatttgcttcctatttatgatgattaaaaactagattgcaaaagttagatgttaatgtaaagaaaactttatgaaaatgataatggatttttatctagtagaaaagataaccccaatgcttatggttttattgctctgtaggacattaacaagttgtgcatcttatttagcaaacttattctaacattagtagatgtgagtgtgtgtgtgtgcgtgtgtgtgtgtgtacgtatacatataggtgtgtgcaggtatgtgtatatgtatgtatgtaggtatatatgtatatactagcaaatgataaagttggttcaaaggacgatgtacagtagtacctccttatccacaattttgctttctggggtttcagttacctgtaggcaactgtagtctgaaaatattaaaaagaaatttctagaaataagaatttactcattttaaattgtgtgccttagtagcgtgatgacatatcatgcccttccgctccataccagcctgggactgaatcatccctttgtccagcgtctccatgctgtctacacttaccctcctgtttagatgcttagtagccctcttggtcatcagattgactgtcatgatatcctagtgtttgtgctcaagtaactcttattttactgaattgttctattttattactagttattgttgttaacctcttactgtgactaattaatgcattttatcataggtaagtgtgtataggaaaaaacatagcatatgtagggttgtgcaatagcatccactggggggagaattttgctgaagttagaacagagaagactgtccagaagaaagaattttctatacttgccaccttttttctgtttggtgtcctcatgtaagtctcagtgttacgatctgtctccccacctcaatcactgccctctgtctctggaaggaaattccccttgggctgaggccagcatggtgccagacaggagagatccagtacccactctggaaaatttcataagataactggttctccaccttcttcagggaccttttatcatatctcatgtgcccatggcatttgtcactgccatctgcacaacactgaactccagcaacatcaactgagaagaaagagagagagagggagaaagagaaagagagagagagaaaagtcgtttgttgattgagccacacaaaattttttttctaattaaattatatatccaggtagctgcaatatgctacaatcccaaatacacatatttattaaatatgattcaaagagcattcattgagtactctgtatcaaggcacaatgtaaaataagtgcaaaattactggtgattgttacgcctttctgtgggactcgactctctctggttggaggtactgtgtgggagcacgtgagctccaatcaggtggtctggagggagcaaaatgcagctgttggaggttaaatatgaagggaaatagcagtaggcatcggatagcatagaatgaaaataaaagtgcatatacttccagtgcctgttttacagattccttgtctttttttttttttttgaagacggagtctccctctgtcgcccaggctggagtgcaatgctgtgatcttggctcactgcaacctccgccttctgggttcaagcgattctcctgcctcagcctgctgagtagctgagattacaggtgcgcaccatcacgcccggctaatttttgtatttttagtagaggcggtgtttcactatgttggtaaggctggtctcgagctcctgacctcgtgatccacctgcctcagcctcccaaagtgctgggattacaggcatgagccagtgcgcctggcctccttgttttttaaaactagttcaaaccctcaactcataatttgggaaattcaggtcataggatgccctgttatttataaggtatccagcaatgcatggaacagaatatttaacttttaaaaaacttatattaggttgttgcaaaagtaattgctgtcattttctcctttctttttctttttctttctttctttctttctttttctttctttctctttcttcttttctttctttttctttctttctctttctttcctttctttcttttctttctctttcttttctttcctttttctttcttgtctttctctttctttctctttctttttctttctttctctttctttcctttctttcttttctttctttctctttctttcctctttcttttctttcccctttctttctttctttctttcttgtctttctttctttcttctttctttctttttttctttccttcttctttccttcctttcctttccttccttcctccctctctccctcccttccttccttttccttccttccttcccttccattcccttcccttccccttccttccttccctccctccctcccttccttccttctctctctctttctttctttcttcctttctttctttctctttcctttcttctttcgttgttgtgttccagaacgatttagtgttacctacagttcccagagaaagaatcctgtcttgaggggtggctggggcagggctactactctccctgctctgtgctctagtggccaggtggatcagctccagctgccaggtcaaatttcctagggaatggaattctgtctttttaacaagaacaaaataggtgcttagtaaatataagatgccttcagcttttagtatatgcataatcataaatataaatttgtttaaaacctgaactattctgatgttctcactggctagccaaacttaaaatgtgtatttggacttgaatttcccaccaagggtgttactagcttctttactgttgcagctgccttttgttttgtttttgaaagtttaaaaaaatacacaagggggcttttgcttcctgaaagatggagtagaattacttttacctatttctctcaagtaaagtaaaaaccccggacattgtacgtaaagcaaacttatgaagactctggaagctggagagaagaaggcagaccagttaggaacattgggacccaaggagcgacccagcagtgcattccacggggtttctttttgcctcatccattccagacttggttctggagaagtttgtcaacccagaaacaccaacaggcccagaaaaacataaagccctaataaaaagctggctctctctagtcaaaggagaaagaaaggggaagcccagtaaaacaattcttaggcagtaacggctctgctccattcaaacacccaacttctccttcctgagtggcaagagaggaaattcgctgagatgagtttaaatgagatccaaagcctcataacacaatactccaaagtccagatttcaaatgaaaaccacacatcccaacaggaaccaggggaaccaggaaaatctcagctttgatgagacagttaagaggcgctaatactgacatgacagagacgttagaattacctgacaagaatgttaaagctgccatcgtaagaacacatcaaactcaacaccaccatcaatgagtaagatcataaatcaacatttctggaaaactccaaccagcaccagcagaattcgcattcttttcaagtgctcatggaacatataccaaaattgccatatactgggccatgtaacaaacctcaacaaatttaatagaactgaaatcacatgaagtgtgttctctgaccacctggaatcaaactggaaatcgataatagaaaaataatgggaaaaatgccaaacccttggaaacaaaacaacacacttctaaacaatccatgggagatttcaaggaaaataaaagattatatattgaatagaataaaactgaagatgtaacatattataatatcaaggatacagtaaaagcccaaagaaatgaaaacttatcccagaaaaatgaaaacttagcacaaaaacgtatacaatacacaactattcatagtggttttatttgtattaaaaaaaaactggaatcagtcaaaatgtcctacaatagattaatggtaaaacaaactgcggtacatccatcccatggaataattagtaataaaaagtagtgagttgggcacggtggttcatacctacaatccatacctacatacctacagcactttgtgaagtagaggtgggagaatcgcttgacctaggagtttgagaccagcgtaggcaacatagtgagaccatgtctctaaaaaaaatttaaaaaaattagctgtgtgttgtgtcccatgcctgtagtcctagctacttgggaggctgaggcaggaggaagcttgagcccaggagttcgaggctgctagagagagttatgatctcgccactgcactccaccctgtgtgacagagtgagactctgtctctaaaaaaaattaaaaaaaaaatagtgagctgttgatacacatgacttgaatggatctgaggggcattatgctgagtataaaggtcacatattgcatgattccatttacataacgtttttgtcttttcaaaaatattgcaaggggtacttggttgcagggtgtgcgcatttttcaatttacaaattggcctcaaattcgtgtattaagtttcattcccacatttgcaatgataagtcctccatggagtttcctcactctacatcctctccaatacttgatattatcaggctttttaatttttttccactcaaatggtcaatacgttgtattttatttttggtttaaaatacatatttgtgttttctgatcactcatgaggttgaccatttaaaaatgtttattggctattggggtctcatctgttgtgaattgcctgtttttaaggtatgcccacttttttattgagtttcttatttttttcactattgcataggagttttcaatctttcttccctcctcttattctttaataacagaatcccaatttttttacagggcaacagtgtcccagccaaaaatctaattcctcagcttctttgcagttaggactgttgagacatcatctgaaatctattgtgcatttctggaaaaattttgcttgatggacagaggcaccactgcttatttctcctttgtgttctatcttcttctatctggaacttggcagaagcacccatcttgcaggatgaaagtcacaagctagagtggaggagcaggcagggaaaggacctgggtcctgcagcagctgtctagctctgaaccacctgcctccagagtccgccttggtgagaaaaatgtatctctttatctgatcaagctcctctagttagatttcaactacatatagctgagtgaatactgatgaatactgaataatgaatgctggtacaactttctaatatcttctcttagagttctgcattgaagtttttaaataagtttagtctatacctttcttttccattttcagtcttcaattttgacttcaagataattctagtcctatgatgtgatttatgtttctaaataatggcatttaccctctttcactattccctggaattggaaaaaataggttatttatttatttatttatttatttatttgggtttgggtaaaacttaaccatatgtttaacaggacctggactttgatttaagcaaacttagggtaaaaacagtttaaagacaatcaaggaaattggaatagaaaatgggtattggatattagggaattactctcaattatgctgggaatcataatggaatggtggttgttttttaaaagtccttatcagttggcaacgtattaatgattggctgaaaaatactgccagtgtctgtgtgtgaggaggtgagagaacagagtaattggatgaggggggaggcggtagttgaaacaagattagcaaaatgttaatttgtgaagcttagggttcattatactatttgtgtatattcatatttctataaacactaaaaatgaaaataaagtggtctcgtgttgctgactgtgactgtcacactctgtcagcagatggcagtgttgtataaaccatgagcctacataggcctaatggatcattgtgcttgctaagtaacaaaatcaatgatacgatataaaccaggtcagattttattgcttttagacaaaagggcaaggtaagatttgcagagtaaagaacaggtacagagtaataataaattattttaaaaattctaagtgattcattaaagtcttatagacaagttgggtagaaaagtacgtaaaaaccccataaacctataaacttactagaattataaaatcatttggtctctctctctctctcaaactctccccttatttgcattttaaatcagtattttcatacatatatatttgcaaaaccttattgatttcattgatgaaaatgacttggagtttgctttaaaaccttacacgataaacataaatattattctgtagttctttttacccaacttttaactggcatagtttaatctatgaaaacagctccatattttaaaagattctctaactatgacaacaggcaacatttcatagatgataaaatgtcttatcaactaatacctaatattttaacttaggttatgtacagtagctttaagaaccagttgtagaatttgatatatagaaaataatatagaccctgtcactgggcaaacttatggtggaatcattttttgtgttgttgtggacaaattagttattctttctgaacccctgtttggatatatattttttaaagcccataatttgggcatcctcataaagtagtgacgtctgaaattaaacaatcaatgtaagagagctagtttcctttctcggcaagagaatatgactctaaaatttatgcccaagttagactatttttatcttgcctctttcccctagaatatttgggtttaattaaaaatttacaatgaaattagaaaaataaaaataaaaatcgaaaatcaaatggagataaaataacagtggtaatcaaaatagacccctattttgatctaaaaaagaaaagaaaaaaagataatttggacatcataaaattaaacttctgctcttcacatggcacgttaagaaaataaaaggcgccacacattgggagaacatattcataaaacacaaatgtgagaaaaaaatcatatgcagaatatacaaagaactctcacagtccatagtaacaacaccccaataaaaacttgaccaaaaatttgaaaggatatgtcatcaaagaaggtatatagtgaagttaaaatactaggctcgagcaagtggaaccctcattcactgctgatgggagtgcaaaagagcacagcaactttggaaaacagtttggcagtttcttataaagttcaacatacacctaccagatgactcagcagtcccaaagctaggaatttacccaagtgaaatgaaatcctgagttcacacaaaaacctgcattggaaagcttacagcaactttattcttagcagctaaaaattagaaatgaccaaatggctttaaattgttaactagataaacaatctgtggcatatccacacaatggaatactactcaacaatagacagtgaactagtgctacacgaaacagcaaggatgaatctcaaatgcattctcctaagtgaacaagtgaacaaagccagactcaaaaggcttcacattgcatggctctatttacatgacattcaggaagaggcaaacgattggatcagacaaaaaccagtggttgccaagggctggggtgaaggaaggggcataaaggaactttaaaggatgagggacttgtcctatatcttgaatgtggttgtggttacacagctatgcatttgccaaaacttatagaaatatacacgaaaaggtggcttttattgtaatttatacctcagtaaacctcacttaaaataagcagtttttgattgaacataaaatctggttctgagcttcttggaaaccgactaaatgaagataatgtgttatgttacataactttcatctaggggaaaaatttctagtttctacgtgtgactgaaggttttcctgggataaaagttgaagacaatttctatcttggggcattgcataggagctgctaaatggataatattgggggcactgcatagaaacggcattggataatactctcagtagtaatttcatagagaataaaaaacagaattcgtatgatcttttttttacttgtataaatttaagcaatacaggtgcaattttgctacatagctatactgtgtagtggtgaagtctgggcttttagtgtatctatcgcctgaatcatgtatattgtatccatttagtattttctcatcactcaacctccttccacccttccacccatctcaatctccagtgtttatcataccacactctatgtccatgtgtacacatcatttagctcccacttataagtgagaacatgtgacatttgaccttctgtttttgaattatccacttaagataatggcctccagttccaaccacattgctgcaaaagacatgatttcattcttttctttatagctgaatagtatttcattgtggtatgtgtatacacacacacacacacacacacacaccacgttttctttatccaatcatctgttgatggacatttgggttgattccatatctttgctattgtgaatagtgctgcaataaacaagtgagtgcagatatcttttttatataataatttatttccctttgggtagatacccagttgtggtattgctgaaccacatggtagttctatttctagttctttgagaaatctccatagtgttttccacagaagctgtactagtttacattcccactaataatgtgtaagtattcccttttctctgcatccttgccaacatgttattttttggtgttttaataataggcattctgactgctgtaagataatatctcattgtggttttaacttgcgattctctagtgattagtgatttgagcattttgttttttgtacgcttcttggccatttgtatactgtattagtctgttcttatgctgctaataaagacatacccaagattgggtaatttacaaagaaaaagtggtttaattgactcagttccatatggctggagaggcctcacaatcatggcagaaggcaaaggagaagcaaaggcacatattacatggaggcaggcaagagagtgtgtgcaggggaactcccctttataaaatcatcagatctcataggacttattcagtatcatgagaacagcatgggacaaacctgcccccatgattcaattacctcccaccgggtctctcccatgatatgtggggattattacaatttagggtgagatctgggtggagacacagagccaaaccatatcatataccttcttttgaaaaatgtctattcatgtcctttgcccacttttttggtggggttattttgctgttgttgttgaattgtttgagttccttctaaattctggacattatttccctgtaggatgcatagtttgcaaatattttcacccattctgcagattatctgttcactctattgattatttctcttgctgttcagaagcgttctagtttaattaagtcctgtttgtctatttttgttttggtgcttgtgcttttgatatcttagtcctgagttcttcacctagattaattccagaagcattttccctaggttttcttctagtgtttttgtagttacaggtcttatatgtaagtctttaatctgtcttgagttaacttttgtatttggtgagagatagaggtctagttccattcttctgcatatggcaattcaatttccccagtactgtctattgaaaaggatccatatgactatttcttgtataaatgttgaatgtgaatagagaacatcagatggcaaagctggtatgtggctttaccatctgtaaacagatggtggactgtccatctggtggtctcagagggtggcctcctaggtattcaccttgatgaagttagcagagctgaggccacacttttagacttgtgtgctcacaaacccttggatgcaaattcagagctggatagattcattctattgcaaaccaacatgttgatttattcatctgtgcctagaaatctaaccattctgtaaacttgatgacagcatcctctggccagcatgtttcttcctagttggaggcgtggtgtgtttgatggagcatcaacttagacacagaattagaatcttaactctgcatcttatgaactgggtgtgacattaggtaaattacttaactttccccaagcctcaaatttctcatctgaaatgtggaaataataacgtttctcttataaacttgctgtgaggagtaaataaaatagtgtttatgaattacttagcatagtccctgggcatgtaatttcttagtaagtactaatttttgttggttagatccagttacaggggaagcaaatttacagatatgtggttcatgagcaacagattttctggattattgtcttacacacagtaaccagactgatctttaaaaatcacaaacaagaaacaaatcaaattattcccctgcttaaactctctggaggtttcttattgcacttagaaactcattgtcatgatccctaggccaacacctgtggttcccacccttggctggtgtgcatagaatcttctggagaactttgaaaactactggtgcccaaattgatgcctagagattccgaagagtctggtccatgtggggactgggcactgtgacttttattagctctctagttgtttccagtatgatcttgccctgacccctccctcctgtctgtgtttcttattgggccttctctccttccctgctcctatgactgggacctcccttctaatctttgaatgtgctgagctcttccttcaggaccgaaagcctcttcattactgagccaggtgctaccaccccttctatgtcaagctcacattccatcttcgttatgactctggcctctggtcagaacgtggggtgctctttcccttcaggaagttgggacttggagggctgggacttcaccatcagagtcttttgtgcctggttgtagttggaatctcgtgcattttcatgtagaggttacactgtttgcagggcccatctggtcttcacagtgaagagagaagtcttagctgttcaaaagtcatgttgcttgctattggagcccctgatatgtggcccagattatggtaaggcgagtgagtgaggcattgccttggtcataaattttaaggaggtcccgcaaactcagtagtcaagataaataatattttaatgcaatatttaaacaatcaaaattaatgcaaaaaatccatgatgaaaaaaaaatcagaattcaggtcaattccaggttgatttagtgaataaagagatatcaatagggactgctttatttttttatattttatttacttaatttttttttttttaagatggaagtctcgctctgttgcccaggctggagtgcactggcacaatcttggctcactacaacctccacctcctgggttcaagtgattctcctgcctcagcctcccaagtagctgggattacaactgcctgccacaactcctgaataattttgtatttttaatagggacggggtttcaccatgttggccaggctggtcttgaactcctgagctcaagtaatccacccgccttggcctcccaaagtgctgggattacaggtgtaagccaacacgcccagtcacggactgttttatatttgtggttaagggggatttaagggataatttgagtctgttctgctttcttgggttgtgtttctcaaactggcttatggggatttccagcgatgtaaattttgtgatgaaaatattttatagtaaagcacacatggccatattgtggaaagaaatgccaaaattttatgaaactttaaaataaatcaagctcaactactggagaagctgaggtaggaggatcgcttgagcccgggagttggaggttacagtgagccatgcattcgaaagcagaacagaatcgaattatccctcgaatgcgctacagccacaatataaaacagtcattactgatatctctttattcactagatagatcctgaattgtctcgctctgtctcccaggctggagtgcagtgcgagaccttgtctctaaaacaaataaataaataaatacaaacaaaaacaagctcaagactttgaagaaatgataccccggagctttcagaccagagactcccgagttacacacattttcttctttctgccactaggtggaggcagtggagcaggttgagaatcactgtcataaagcttgtaattaaagaacatcagagtgccagacagtggagctgctataaagtgcagaataactactcctgtcctatacttggtcgcgtatgagcgggaagtgaatggaagggaggctcgaaacaatgggaagagccgtaagaatcaggtctgataaacttacataaacggccttgcacacaacttttctggctgaacctgcacttcccataagtcaaatgcaaatgttggaaggaatatcttgcgaggttctttctagcttgtacagcctgagctattttaaaggagaaaagctgacgagcaatcgtccttggaatttgcagtgcataaacttgaccagcaaagggcagcagtgcacacaccttttaaaaagtaactttccaaattttctactgccatgagagagttctgattctacaaataggagacagtgtttggaccacttaataacaaccaaccataaaagtaaattttctttttattaaaccttttaattttacatttgtaaacagaaaagaaatccttattttgttggctctgggacatcactttcttggttcaactccttcctcctgaccactgcttctaagtctcctgtgctgttttcttctcatctcttcgacctctacttgttgggttacctgccaggtcccagcctgccttcattgatttaactcattgctagtaacctcgccctgtttcccaaatttgcatctccacccggactatttcccgaactccagaatcacgcatattcatccacctgtccaagggatattgccaattagaggtctagcaggcatctcaaatgtctaatatgttcaactctaatccctgattcccgcctgccttccccatctcagaaaatgtccttccaaattctctagttgctcaggttaaacacttgcaaccaccttgatttcacgtttctcccacgcctcacatccaatatgttaacaaattctattttttctacctttgaaacatgaccagaatctgacacttttcaccacagttgccactgagcctcttgactattatcaagaaaggagatgtgttctgttttgtaaagattattaaaagatgttaaattgggactttttttgtatttgttttgtaaggtatctcaaaggccaagaataatataatggatattgtgttctctaatggaacaattcattttctctcctcctccactgcatttttggggatggtggaagtattggaggattttcagaataagaaacaattttattgctgttcaccagatgtcaggagggtatggtgtggtgggcctgggagtggactgtttaaccctagaacttagaaaccagtgtccctgtggagcacaaaccctaataggtcttggtgagtaacagaatagataaaagagagctcagtctggtcataaatcctttggccagttgccattcattgccatgagaaattccccaagaagacacccacctctttttcaggcaattctgtttactagattctggaggattcgttatcatcgaagaaccctgccttctagtcagatggtgcattagtcagaattctttttgcaagtaacataagtcagctgtaacacatacaagtagaaaaggaattagaaaaagaaaagtagttatactaatgtgaaagaaaaaataaacctcaggaccccaaaaatcactaagccaaaagggaaagtcaagctgggaattgcatcaggcaaacctgcctcccattttattcctaaataagatagctacaaagaaaaaaaagctacatacctccctcacaatttgcccacaaggtaattccttgtggacaaagaaaggacagagctcaaagtcatccctctgttcacttcagacaaatgcatatgcaatgcttcttctgccctactgtttcaataagccagactaaggcataaatgactatttctctacctgcctttcacatgtgaaaggctgatcagagactcaaaacaatgcaaccccagcaggaagcccccttccctgccttgagttgtcacacctttccagaccaaagcgatgcacatcttctacatatcgattgatgtttcttgtctccctaaaatgtataacaccaagctgtgccccgacccccttgggcacatatatcaggacctctggagactttatcatgggcttgtccttaatcttgggaaaataaactttctaaattaattgagatctgtctcatactttgagttcacactaggttgttcacaaagacacaaggaaggctatagatccaggatggggctatgcaggtggaaaatgtacctttgatcatgtcaccaaaccagtccagggatacgcccaaaacatgcttggcagcatgaggctgcagtgtgcactgatgacattagtgcttatggacttggtctcactgctagtgagagtcattttcttgattatttttctcaaatttgggtgaggtgaatgtgtagctccacaagatggtgtagagggggcaatgtgaagccatgtaaccttattgaacatctttttggagtgtccattttacttgaatggctcatggaaaaaaattatattaaaatttatacacacataaaaggcacaagttgtagtatttactacgagaagaaaacatgatttaagagataagcttcaaactgcacaaatagcagtaggggagacgaagatagttattcacttccctctgctgcttattgtgaaccatgagaagccccatcttaaagcgtctgaggaagtacatggacttataatagcaaatctatgcatatatcttattttagccttttctgctagactttgggttggagaagtgatgtgagaaggtgtaaagagcacaaaattaggagtcaaaaggcctggttttagcctcagctctgccacgaactaagtgacctgggttaagatatttctatctgtgccctctaagatatttccttacatcaaagaatgcaatagataatttctaaggttctttttggcttttagtctctaggtcattggaatggagacgttaggcgagcattcttctttggagctgtagaacattagtttgatcaccagaaggcacaggatcccatggtgatataggattataggaaatgaacaaaacacagtcttctctcatgcacttctctcacagtcttctctcacttctctctctcttttctgttttgtgtatttatattttccataatagggtaggttataccactgccccaaatctcatggcctagctccaacaaatgcttatatcttgctcatgctacaatcttcaccagggccagaaaggtgctctgctccatgcagccactcaaggatccaggcagacagaggctctaccatcttgtatttgcaccatttggagcacatggcctcttaagttgcttatacagataaaggatagactggaaaattccgtaagatctttttcctgcctcagcctgcaaaggatgtatgtatgcctatttctttggccatagcatttgtaaggagactgggacatataggtgagcaaatggaacatatacaaagtaataatgtctctaagataaatatttacaattcacaaatgtacaaagaattttatagatgcatccataattcacattttgtgtcattatcaccattttctcctaaattacataaaacttattttatttattgacatgtgcttcatatttatcatttatcactgcctgctaattttcatcaggagcatcaatggctattcaatatcctatttatgtaccatagtttataaatgtattgacatttaagtgataatttattatggttttttgctattataacttattgaattgatgaaatgacatacttttattaactgatttttctaatattaatttctagttccatgaggctttccactttggatggtaaaaagggagatagcatttctacttatatgcataaattaattctaggtagtgaattttatttatctgggaataatttttagatatggcaactctcattcattttgacaagaaaaatctaaagctcataaaccctgaatcctatatgcttactctcacaaaaatctctaatgtcctgctgggatttatccacagtttagattagacctggaatacatatggtcatgcaacaatgatcttagaacaggactttaacttggctttaggaactgaggctgagagtaatagaattgatttttttgtgtgtgtgtgaagctcctattataataattagaatactttgattcactcagttaaagttttcccctgatttattgtgtacatacaatgaaggatcaagaaagagaaatttttaaatggaagcattagccagacaagtttgacctcacagttttactaggggatatatcacctagttttggatctatttctaacatcttaacattgtgaaaagagtcttgggaaactggttaaatcccaaagaatgctgcaataggaggttggcccttatgagttatttaatatcttgagctgccttcggaaaatgttgctgagcaggcattgaagagtatcgataaaatttattgagaatttgtttattatgattaacagaggtaaaagccagtatattactgattaatataggtaaaaggcagttaagaaattgggaatgctttctcttctgctttcttctacgatgcacaaggcgtttcacatttatgcccctatgaaaattactaggctgtcctagtcattagatctttcagcagtttgtagttttagagcttctaagttgacttctgtcttttctattcatacaattacacattctgtgatgatatttttggctcttgatttacattgggtactttcacaacccactgctcatgaaatttgcttttgtactcactggttgtttttgcataggcccctccaggccacgaccagctgtttggattttataaacgggccgtttgcattgtgaactgagctacaacaggcaggcaggggcagcaagatggtgttgcagacccaggtcttcatttctctgttgctctggatctctggtgaggaattaaaaagtgccacagtcttttcagagtaatatctgtgtagaaataaaaaaaattaagatatagttggaaataatgactatttccaatatggatccaattatctgctgacttataatactactagaaagcaaatttaaatgacatatttcaattatatctgagacagcgtgtataagtttatgtataatcattgtccattactgactacaggtgcctacggggacatcgtgatgacccagtctccagactccctggctgtgtctctgggcgagagggccaccatcaactgcaagtccagccagagtgttttatacagctccaacaataagaactacttagcttggtaccagcagaaaccaggacagcctcctaagctgctcatttactgggcatctacccgggaatccggggtccctgaccgattcagtggcagcgggtctgggacagatttcactctcaccatcagcagcctgcaggctgaagatgtggcagtttattactgtcagcaatattatagtactcctcccacagtgcttcagcctcgaacacaaacctcctccccatacgctgggccagtaggtctttgctgcagcagctgcttcctctgcacacagcccccaacatgcatgcttcctctgtgtgttggggaggtcactctcttgatttattcgttggagggtttgcagggcccaggattaaattaagagacttgacttttgctggatctctttttgtagaagattattaaagcaaaatgttgtaaagatcccttagagacattgtcaggagtttttgtgttgcaggaacctgcatgtttcacatggacacatcacatgaccgagccaaatagatttatctttactctctagaacagggtccactcagttttacgcacagatgggtcaattctttcctctatgtgcctccttgactctggaaagtttctacttggattcctaattctcttttttctttcttcatctgcaatccttcccaatattaaaccttgatccttcctattcatagcctcccacatagaaggtagtgtccctctgtagctttttccttccagagaccctgtttctttccatcatattaatactttcataggcaattttctaattctttattactctagaaatatgtgacagcatttctcattgccttttacaatagtttgccaactttcttcttatttatcatttttccatttttaattttcatggtatacagtagaaagattatatacacacacacacacacacatatatatatacacatatgtatatatatttatggggtacctgagatgtttagatacaggcatgcaatgtgtaataatcacatcatggagaatggggtctccagccccttaagcatttatcctttgtgttacaaacaatccaattacactcttttagttatttaaaaatgtatagttaagttattattgactaaagtcaccctgttgtactagcaaatagtaggacttattcattctttctaagtattttttgtatggattaactatccccactttccccctactccccacccctgcccactactcttctcagcctctggtcgctatccttctagtctctatgttcataaattctattgttttcatttttagactcttcatatacatgagaataaatgatgtttgtcttcctgtacatggcttatttcactaaacgtaatgacgttcgttagttccatccaaattgttgcaaatgacaggacctcattctattttatggctgaatagtactccattgtgtttatgtactacattttctttttctgttcatctgttgatggacatttaggttgcttccagatcttagctattgcgaacagtgctgcaacaaatatgggagagcagatatctctttgatatactgatttcctttgttttgggtatatacccagcagtggagttgctgaatgatatcgtagctctatttttagctttttgaggaacctccaaactgttctccatagtgggtgtactaatttacattctcaccaacagtgtataagggttcctttttctccacattcttgccagcttttgttatcgcctgtctcttggatataagccattttaactggggcgagatgatatctcattgtagttttgatttgcatttctctaatgatcaatgatgctgagcaccttttaatatgcctgcttgtcatttgtttgtcttcttttgagaaacgtctattcaaatcctgtgcctatttttgattggattattagactttttcctatagagttgttttagctcctcatacatattatggttcttaatctcttgtcagatggatagtttgtaaattttttctcctattctgtggttgcctcttcacttttttgattgcttcctttgctgtatagaagcttttaaacttaatgtgatcccatttgtccatttttgctttgattgcctgtgctagtggggtattactcacgaaatctttgcccagactgatgtcatggagagtttcccaaatgttttcttgtagtagtttcatagtttgaggtcttagatttgtctttaatccattttgatttgctttttctatatggtgagagattgaagtctagtttcattctcttgcatatggatagccaatttccccagcattatttattgaagagattcttttccctagtgtaaattgatgacatctttgttgaaaatgaattgactgcaggtatgtggatttgtattgcagggttctctattctttccattggtctatgtgtctcttttttatgccagtgccaccctgttttggttactatagctctgagtataatttgaagtcaggtaatgcaattctttcagttttgttctttttgcttaagatagctttggctattgtgggtcctttgtggtttaatataaatttaagggttgttttttctatttctgtgagaaatgtcattggcgttttgatagggattgcattgaatctgtagattgctttgggtactatggaaattttaacaatgctgatttttccaatccttaagcatgaaatatctttccattttttggtgtcttcttcaatttctttcattggtattttatagttttcattataaagatctttcacttgtttggttaattcttatgaatttaagtatggttattgtaaatgggattatttttaattttttgtcagagtgttcactgttggcatatagaaatactgttgtttttttgtatgttgattttgtgtcctccaactttactgaactggtttatcagttctaagagttttttagtggagtccttaggtttttcaaaatatgagatcatataatcgcctaacaagaataatttgacttcttccattgaatttttgatctccttaatttctttcttttgtctgattgctctagctaggacttccagtaccatgctgaataagagtggtgaaagtgggcatccttgtcatgttccagatctctcaggaaaggctttcacttttcccccattcagtgtgtctgttatatatagtttttattatgttaagatatgtttcttctacatccagtttattaagtggtttttatttatttatttatttttgtttgtttgttttttacacatcacttcttttggccattcctagctccaagagggtctgtgttgatgttgttattgttttctaataaggaaaaagaggaaaactgaggttaggagacaagtagccacctgtgtacagggtcagacataaagtcaaatgatcactgatggagctctggtgataggcctctcttaaaaatcaccaaacttaatgcaaaatcctaaggactccatacctaaaaccccctaaaatgagatcagtgaaaatgagcagtgggcaaaattgggacccatgagaatgtatccagtaggatcatgatcagtcaagcaaatgggtttaacttggctttcctggtttattattatttatttcctggtttattattattatactttaagttctgggatacatgtgcagaacgtgcaggtttgttacataggtatacacatgccatggtggtttgctgcacccatcaactgatcatctacattaggtatttctcctaatgctatccctcccctagcccccgctctccccccgcaggccctgatgtgtgatgctcccctacctgtgtccatgtgttttcattgttcaactcctacttataagtgagaacatgcagtgtttggttttctgttcctgtgttagtttgctgagaatgatggtttccagcttcatccatgtccctgcaaaggacatgaactcatccctttttatggctgcatagtattccatggtatatatgtgccacattttctttatccagtctatcattgctgggcatttgggttggttctaagtctttgctattgtgaatggtgctgcaataaacatacgtgtgcatgtgttttatagtagaatgacttataattctttgggtatatacccagtaatgggattgctgggtgaaatggtatttcttgttctagatccttgaggaattgccacactgtcttctttggtacgtgtaaattgttgaactaatttacacgtaccaaaacagatatatagaccaatggaacagaacagtggcctcagaaataatgccacacatccacaaccatctgatatttgacaaacttgacaaaaacaagcaatgaagaaaggattccctatttaataaatggtgttgggaaaactggctagccatatgcagaaaactgaaactggatcccttccttacaccttatacaaaaattaactcaaggtagattgaagacttaaatgtttaagatctaaaaccataaaaaccctagaagaaaatgtaggcaataccattcaggacataggcatgagcaaagacttcttaagcatttttttgatagagtagcacagataagtatctgtctgttttttttttccaactgtatttccttctgctctatttttttctgtctctgcaacttcaaatatttgtaaattaattattgagaaaataataatagtaataataataattattattatttgagacagggtctcactcagtcacctaggctggagtgcagtggtgcaatctcagttcactgcaacttctgactcatgggttcaagcaattctcctgcctcatcctcctgagtagctaggtctacaggtgtacaccaccaagcctggctaatttttgtatttttagtagagacagagttttaccatgttggccaggctggtctgaaactcctgacctcaagtgatccgcccaccttggcctcccaaagtgctaggattacaggcatgagccaccgcaccctgctgagataatgattttttaatcaaataactaagttttctttctgttctctatatattgatgtatgttgtatattgtcattgaaattttgattatactcaccatgggatatcttactttggaataggtggcatctcaaatacaatttatttcctttggcagaaggggattattttgttgtgaattcaaaccttcattaacttcagtgtaacataataccataagtgatgtttcctgttattaaatcacaaacagtattaggaatgagaggctgaagcaggagaatggcttgagctcacagatttgaggccagtttgagtgacatagtgagaccccttgtgaaaaaaaagagaaaattttaaatgcggtatatttaaaacacatatttctagacatttattactggtatatggaaatcatgtttattatctaatatcataaactctgacatgatcactatcatttctttagtttttaataaattttcagcatttgtgtatgtcatatgtatttattgattgacatagaccttaatgtcttataatataatacagaagtggacatgagcatattataatttaattaaaaaaatgaaagaatttccacttagaagaccaccatagctgttgctataaatgcagaaataaacacaaacttaactaaaaattcatgtgtatgatgacatcggagagctacagaagacacaaaggttagatgacctaaaattctagagaagaaatagacctctgtaggtgaggtaaatctgagctctcatttagttctttttttgtgtgtgtggtttccatggaatctatttaatcaaaactgcagaaggttctagaaaaacacatttttaaccaaggactgccgatgattctaagttttgagtaaaactgtggttgggggaaacaattttctgctttattgtgtgtccgagtacatacatgataaaagtaaaagccagggaatggaataaaacatagctttatataatatattagtagatacctaaatacaatatggtcttaaaaatgaagtcatatgtatatagttgtattcctaagtatgttagtcccccctcatccacaaatctcctttctgtggcttcagttacttatagtcaaccacagtctaaaacacatgagtactgtaaaagaagatattttgagagcgagagggaccaaccaaattcacataacttttcatattagatcttagtgatgcaaattagatcttactcatacaaatgagacattgaattaagtctttctctcagtctgacccttagaattgtcttttgtaagattttaaaatgcatcaagtaatacttacatatgtaacagctgacccctgagccatcactgacacagatggtaccaggactgctgtgcacagacaggctttcgactctgagtagtagacacaagtttgctgtatttgcagcctccacttgagggcttgggggttccctggcctggctacactgatagcacaactggctttgactctatccccaattccccttcctccctatcccctatgcaaatcccagtaattctccaggtgatatcctggggatttccttgggatattcttggtcttcatcctgccttagagaaaactgatcctcagaggcctcacctgatccagagttttaggtttatcctgacccagactctaattccagggttatcctcttgagttggaggaagaaatggtgatttttaaaagataatcatctataggatcagtagtcagaggcttcatgctgatgagctgtaggaaataagatcaaatggcagcaaaagggtggaatacggaagtttccaaaataataataaggtatagcccatttggttcactggaaattaaagagacccatggccttgaacaatgatgtatgtgtgagttacacacccttcaaagaaacatggtgttatctttgtgtgtctgcactgaatagcttggtcatataacggtaataagaatggcagcaaaatgcccagtcatcgcccaatgggctcatgaacaaagtgatcgcagtggcaggaatggagcttatgcatggcctcagtaaaatggactttcactccctacagctgatctggctgtggccacagctgagtgtccaatctgtcagatgcagagacctacactaattctctaatatggcaccattcccctgggtgacaagcagctacgtggtggcaggttgattacattagaccacttccatcatgtaagaaacagcatttcattcctactaaaatagatgcctactctggatatgaatttaccttccctgaacacagtgcttttgcctgaactatgatccataaacgtacagaaagccaatagtcctaagcaagtttatattctctggacacagtttttagctgctgcaatcaaacatgatttaattaacttaccatgggtaagtggcttctcttccttagctaacaaatgtgccactcaaaaacttagttttgcggcagcctcattttcattttttaattttgtgaataaattctgttatgaacagctattgtgttttaaatttttctaatttttacaaatcatgaataggtattggattttgacaaatgctttttctgcacgtaatgatataatcatatgaaatttctttcctctcaatctgtgtatctttaatttccattatttgtcttattatattggcagaacttgtagtactctgtggaaaaggaagtaagagggaacatcctttccacatcttagcaggaaagcttctaatttctcaccattaaatatggtgttacatgcagatttttgtagatggacttcatgacttgcatctacaagaggaagttctcttctattcttagtttactgagagttttttctttataattaatgagtatgggatttctttaaattctttttctgcgtttattgatatgattatgtatttcttcttaatctgttaatatgatggattacattaattggtttactaatattgaaccagccttgcagatgtggaataaatcccaattgcttatagtatataattctttttagatattgttgggttcgatttactaatattttattgaggaatattgcatctattttcatgagcaatattggtctgtagatttttttagtaatttcttttttttggtttggcattctgattatgccagtctcatagaaacaggaagtattctctcttgcttttctcttctggaatatattgtagagaagtggtataatttcttccttaaatattagatagaattcacccataaatccatctaggcctggtgttttctgttttgaaagcttattaattattgattctacttcttcaatagatacaggtcttttctgattttactatttcttcagtgtgagcttttgtagattgcatttttcaaaaagttggtttatttcatctaggttatcaagtaagtgggcacaaagttatctatagtattcttttactatttttttttagcatacataaaatctataatgatgtcctctttttaattccttgatacttttccttgctctgaagtctggtctgtctgaaattattctggttttcttttgataagtgttagcatggtatatctttctccatccctttacttttaatctatatgtctttatatttacaatggatttcttgtagactacatatagttgggtgttttttataatgtggctgacaatctcttttaattggtgtaacaatccactgatgtctaaagtgattattagtacatttggattgatgaataatgtttgttatttcatatttggtgctctggttctttttgctcatttgtctccacactttttttctgtcttttgtgatttcaattgagcattttgtatgattccattttctttcttttcttagcatatcagtgatggtgatctttttttttgtttttgttttttactttttaagtagttgtactagggattgcaataaatgtacaattaatccaagtcaggttttatttacttttttatgctaatttttttattagaatgaaagctataaataaacacattacatagagaaaacttttaatatatattcctatgtgtagattatacaagtgatgtttgcatacattcttgttattaagaaactacaatgaagtatttagattaaaaagtaaaagtcactcttcatacaccactagtggtctttctactgttccagtgatttaataaaataatttttaattgtttttccaaaatattttattattaaataataatttttcatatttatggggtacctgtgatattttgatatatgtgtgtgtgataaacaaatcaaatgtgtaataaacaaatcaagatatttaagacatccatcacttcaaacattcataatttctatgtgttgagaatattcaaaatcttctcttttagctacttttaaatgtacaatgttattgatagctattgtcaccctatgatgctatcaaaaacttatgccttttctctaactgcatgtctgtacccatcaaccaacctctctttattccccccttcccagcttctggtaactattctactctctagctccataagatccactactttagctcttacatatgagtgagaacatgaaatatttggctttctgtgtctggcttatttctaagtgcacttttaattaacattaaatgtttcatgggtagtgcaaatatgttatgataatagtagctattaatcaaaattctatgtattactgctgttatataattgtgtggcttaataaatcgaaattaaattgaagtataattaattttaactctccagcctgagtattaaaacaggaactactgatgcttaggcagtaagcactgtgagtaaatcattacaaaataaaagcatactcataaacattgtaacaaaacatatcaaggagttattataattctcccaagagtttagaatctccatgtttgaaaattgctgtaataatgcaaagcaattttccacagtattagaagtaaaaactaagtttaaatattgttatatttgatagaaaagaacattattctcatatgaagattcaaattatcaattattattgagaaaaacaatttaaaaattattttttccttgtaatggaggatccagtgatatgatagaatgcataagcagacattttgaattatatgaaagctgatcttgctattcatgttactattatattttcaaagtaataaaatatttttgagaaaattctcttcctgttttaagaagcagccctgcatttttattttgcactggggctcacaaattatgttgttggttctgttttccagtaatacatatcagataccagcaatgctgaagtttggaaactttctagaatgctttttgtttcattaggaagagtcctccacctccatgattccctttgccttctagaagaataaaatgggaaaaacagaattttattattaaaaaaaaaaacccagaagagtaacatcactttccactcaaactgactacactaatctaatttctcattctttatctcttttacactaaggtatacctgtaattttcagagttccattttcaaagactgcttatagtttttaaaaatgtgcatttatggtatagaaagaaaatcattttacgactaccaggttccactgaaaagtaattaatatactgtagtcaaaataaaataaaaattttaatacatgaaaacaactaccgaaatgttatgaaattatagtttagtagaactaacaagtgcattaatgcaaaagaaaagtagggctcagtaatcagggaaccaagtgtgcattgtaaaagtgcagcctctctaacactgggtttcatcacaagtaacagaacaggatgcctgatgcagggaaaaaagaaaggcaattgttggcaatgtcaggaatattgccatggcgtctaccactggtgggttactgagcatcagaaccacagaagaggtaacactgaagcctgcagaataatgagtcttgttgcagaaatgcaaagaaaaagaaagatgataaatgcacacccaggaggttacgttaattttaaccttctgagtgtgcacagctgtgaagataaaactatgcacagctcatgggttaggtttcacacagtctgccatttaaacactccctatgtcaccatcatgtaccatataatttgcatatttgtcctttatataaccctataatatgtttgtggccataaaatctgtgctgtcaaactgattaggaactgactaccacctgcaggtcagggccaaggttatggggtcccaggttcacctcctcagcttcctcctcctttggatctctggtaagagaaacacttcctctcctctgtgccaccaagtcccctgcatatccacaaaaataatatattttcataaggaattgattttcctcattctctgcaaatatgatgcatttgatttatgttttttactttgctccataatcagataccagggcagaaacgacactcacgcagtctccagcattcatgtcagcgactccaggagacaaagtcaacatctcctgcaaagccagccaagacattgatgatgatatgaactggtaccaacagaaaccaggagaagctgctattttcattattcaagaagctactactctcgttcctggaatcccacctcgattcagtggcagcgggtatggaacagattttaccctcacaattaataacatagaatctgaggatgctgcatattacttctgtctacaacatgataatttccctctcacagtgatacaccctgttacaaaaacctccaagttctctcagtgggattgcctcagctgctgctgaaaatgttcagaatgtggaactgggtggccctgtggtgtttataaggcttctccatgcccatgcaactcacttcctttttctttttgtttctgtagtttctgctgcccccatgctgtgcctgacacacttgatatggcaaaaaccaggacagcctttctcacgttgtccagctgtgccaacaatttcacttccaagcagaggtaaattctcatggccaactccctgtcttttgccacactcatcatttccacctccaagaaaaacaaaaccaaaaaccaaaatgcatctagcttagattccaaatagtagcattaaaggaaattgtccctccctataagcattctcaccctcatccacacagtcatcgtgactcttccctaacccactgagtgctcaccagtcctcttcagtcctccctccagtgatggggaaaagcgagtgatagttatgagagcaacatgtaacctgggtgcagactcttactagtcaggtttgcctcagatttcaagtatttatctttcttttattttccattttttttcttaattatatggatcagtaagatgtctcatttcttttttttaagttacttgttcttttaacacaattcaattctataattccaaatttaaagagataccctgtatgtctttggcatgtgttatatctggacaagttttgggttatccccttcatgccactgctcaaatcttacctgaaaccccacatatttttccaaaaacctgaaaactgtgtagcggttgaggaaattaaatttggcaaatcacaatacttgaggaaacatgtatctttttatcttcactctctaatgttcaggtgatgctgtttaattgagcatttgctatttagaatcacccctctgaaacttgtgggaaaacagcaccagcaaggcagtcttcatgttttgacctcattattcctggattatgctagccttcttgctattgttctactacagccactacctgaagaaacctcatgtaggattgtttcctaatgaaatattaagatttatctgcaattatccctaactctgcaaacttaactgacttctcaggttagtatttaatagccatcaaataaggagtggctgaaataatattaccaaggaaggaaataattggatcatagaaatgagggctttgtggttattgcatggtgaagaccaacaaaggccattgcaaccagtaataatatgcacaatgatgagctcgtagttaagagcaatttctgtcttagttttactgtcactgaactgggctggaaccctggagggcagggtagatgaatgataatcaaaaacatgatttcatatgttaagttctttggaaggctcaatttcggagatttctcccactttctataagagcagacatcaaagaatctgattctggaatctcgttttttctcttacagctctctttttttctactctaatctcttttccgcttccaaggacatacattgataaatatggtcaacagaatattaaggtgatgtcaatattagtgactaccctataagagggaacagaaacattcgtgtttgtaagcttttagtcctcacttaagcttctttcttgagtaatgtaatcgctccccttaatgtctggagcagacattagtaagaataataaatagtatgtttagtctcaaagatggtgaatacagaaagtggtcagaatgtgaacaacactattaagtatttagctaaaaataaaactattgagttttgtaaattcttatcaagtcttctctaagattgaagctccaggttttagtgaaaatcctgtccaggaaatattacattataatccctttctctctgttcccatctaccttaggctcatagtgacatgaaagcaaatttccatcctctgggaatatataaacccggattatttctttttatatagatgctctatcccttgcctgtgtgctattttcttactgagtcactaccttgcaccatgtacacaacccccagtggtttatgataggatgaacctattgaagcagctagcagagaaaaggttatttatgtgggtaactgtgtatgcttgttggacattccctgggtctctcacactgttaccacagcagcattataaaaacatcatctatctatctctctatctatcaattgatctatctgtcaatctatctattgtctatctccataaacacacaaacatactcacatttgtgtgtgtgtgtgtgtgtgtgtgtgtatgtatacagaagaaatgataaaagttatatatgtcttatgtcccaaactttagaaaggatatgtaacatgttagcaatctttgaacacacttgctggaatatagagtaaaatactttgttgctggtatatcaaactgtagtagataatccttctgatttccaaacagggtatacaaatgcacctttccaccagcaatgtatgagggtttctattgttctacatgtccaccaatacttggtattgtaaaactttttaatttaagcctttcttctacatgtgtagtagtatcactccataattacgatctgtgtttgtgggattatatatggattatatatgcttgtagggcatttgaccatcctctgggttaaaatttctgtcaaattctgcccattttactaatgcattttctgatttagttgaacagatatgtatgaaaatatatatataacatatgcgtgatatatatcagcgtgtatctgcctatcatccatccatctatctatccatcaatctgaatgtttgtgctctgccaaaattcatatgttgaaatcttaatctcaatatgttgatcaagattgagccttggcaggtaattaggctgttagggtaaagccctcatgaatggaattaatgtctttataagaagaagtgaagagaccagagggctagctagctctctgctcttagccacatgaggatgcaaggagaaggtcctctacaaacctggagtcgggcttcactatacaccagattggctggcaccttgatcttgaacttctcagcttccagaattgaaaaagtttctgctgtttaaccctgtccatcccccagtttatggtagtctgatatagcagcctgaactaacatctgtatctatatttatacaattatagatatagatagaaccagtattttttcgcatttgtctctgtctctggtttacctttttactcacttaagtctgtaaatggaatcattttcttaatttgtttttcagattgtttattgttattgtagaaatgcaacttttttattttctttcctgaaactatatttaatttatttattagttctaatattttttgataagttttttaaaaaaatttattttgttttaagttccaggatatatgtatggatgtacaggatgtgcaggtttgctacataggtaaacgtgtgccacggtggtttgctgcacctatcaacccatcacctaggtattaagccttatgtacataagctatttatcatgatgctcttcccctatcccccagtgtgtgttgtccctccctgtgtccatgcattctcattgtttagctcccacttgtaagtgaggacatgagatgtttggttttctgttcctgtgttagtttgctgaagacaatggcttccagctccatccatttccatgcaaaggacatgatctcattactttttatggctgtataatattccatcgtatatgtaccacgttttctttatccaatctatcattgatgggcatttgggtggattccatgtctttgctattatgaatagtgctgcaatgaatgtacataagcatgtatctttgtaatatgatgatttacattcctttgggtatatacccagtaattggattgctgggccaaatggtatttctggttctaggtctttgaggaattgccacactgtcttccacaatggtggaactaatttatattccaacagtttaaaagtgtttctatttctccacagcgtcaccagtgtctgctgtttcttgactttttaataattgccattctgactatcatgagatggtatctcactggggttttgatttgcatttatctaatgatcagtgatgttgggcttttcttcatatattttttggccacatatattttgagaagtgtctgttcctgtcatttgtccacttttaatggagttgtttgtttttttcttgtaaatttgtttaaattcctggtagattctggatattagacctttgtcagatggatagagtgcaaacattttctcccattctgtagttgtctgttcagtctgatgatagtttcttttgctgtacagaagctctttagtttaattaagtcacatttgtcaatttttgcttttgtttcaattgctttcgatgtttttgtcatgaaatatttttatctgggtatgctgaagaatagttttcctaaaagttatatattaataaacaaagagttagtgagagcactagaatcagagaatatatgtaagagtttgttcaaagcagggtcttaaattttagtctcattgcaaatttggattctattcctcttgaatggactactgaagagatataaagaccatgaggaagcacgaaaatatctgctttgctgcctcaaggatgtttaattgccccattgattctcttgggaaagaattctcccattgttgctcactgattctcaaagattagaagtaaaaataacttaggggatttgtgactaaagttcccatgcctagagatactgacctcctacgtggtgttgagtttaccttaattcttgaaggatgcttaactttgaagggaactctagctatatggctactttttcttatcattttaaggaaattttatggtctctgcttttcctgatttatgtttagaggttagctattaatcttattcttgtttcttcaaaatgagagaattttttctgattaagatttttttgtttgatcagtagatagtaaagtgtgacattatttatacaacgtaacactacacaacaaaaaagattaataaattgcaacaacttgaatttttacagtaaaattaaaatgacacatatctattacctaaaacacatctgagaagctaatttatagaaatagaagtatgcatgtgtaaagatataggtaaaattgtattaacaaatccattgattatattagcaaaacctgaacataatttaattgcccttcagtagaaatgtttgaataaagtataggttttctacacaatccaaaatgtgatgataaagaataggttatatttttcatctcttgatctggagataatctctttagaaatgttaaacataaattcccaaaaatgttaatttatgagccaatatttgaaaacatagaagcagaattatgaaaagtagtaatttgtcttttctatctttacaaatatggaatcattttacatcttgtggggttacaatgaagaaaaaaagcagttatgacaatgggaaaaatgtatgcgtaacatacagcaatgttcacagagatgaatgaagttatagtgacaaatgaaaaatgtaaaaggcaatttgatttatattgaatatatatatgtcaggaatatggaatgagaggagacaggtaaacacaataaaaactctgaccaatgcctgaaataaggatattacagaaataaaacaatgctatttaaacatctaaaaacagcataataatcaccagaattaaaaaagatcctgtagatgtgtgttcattcatagaaagatggaagtccctacattattattaatattttcaccatcagagaaatagggtgctactcagaaaaatattttttaaacaattgacctaaatcatatcaagtaatgagatatttcttgagtccaggcatgatcatgtaaatgcatgttggttaaatccttggacttgtaatgcacattacaactttcagaactcctctctgtttagcatttataggagaccttctgactacatcaaacttcatctaatcacattttacctgcactgagaacttttggtgggaagtgagatggaacgccatagtgtcattgcatattcagaccccaagagggagctgagagatcatgccttgaggaagtgattctgaaagagtccccacagtggaggattccagagctctgtgtgataacattgcctatccactgacccacgccctccccaaatgtgcaaagaaagtccagctgccagaagcccttatcagtgtgcagattccccataatcaacactcctttgcatccaccatatctgtaggggaagtgcagttccaggctcagctcctcaggtgtcttctacccaggtgaaagtccaaggtagatcagtcacaaaatcagtgcaattttaaaattgctttattaaagtacagtgtcaaaccatgaaaagcacctattttaagtgtgcaaatcactgacttatggtaaatttgcaaagttgcagataaccacagtttaatcttacaacattttaatcatcccctgaaggatcccttatgcagaccggcagctatttttatttccactcccagtctcaggcatgtattaatcgactttccctctattgattgcttgatatgaacattctatataaatggaataatgcatgcatggtcgtttctatctggtttctttccattaaacgaagtttaggttcatccctgttttagcatgtatcagtaggccattcctttttatttttggatagtattccgctgtacggatatatcacattttatttatctattcacaggttgaggaacattgaggtcctttgcactttttggttatatgatgatcaacaatgctgctatgaatatttgcctgtaagtctttgtgtggacaccggttttgatttttctcagacagacctctacaagtggaaatgctgagccatatgataaatttctgtttattttttaaaaactgccaaactgttttcaagagtgtgcagcatttaacacttgcaccaacagtgtatgaagccttcttttctgtcacattctcaccaacttttgttattgtctgttttttaaattattaaaatcattatagtgtatatggaatggtgcctattgtgaatttaatttgatttttgttaatgactaataatgttgagcaccttttcatgtgattactgtctgttcatatatcttcttccataacatctatactaaaatattttgttcatttttaaattgggttgtcttatgacttatatattctggaaatatggcgtgtatcagataaatggtttataaataatttctctggtctgtggtttgtcttttcattttcttaatggtatcctttgaaatgcaaatgttttgaacattaatgaaacctaatatattagcattttctttcataagttgagcttttgatgttgtaactaagaaatatttggtgaacccagaaatggaaaagttttaacctaaagtttttataatttcagattttaggaatgggcagaagctggaaacattccccttaaaaactgacacaagacaaggatgtcatctctcaccactccttttcaactgagtattggaagttctggccagggcaatcaggcaagaaaaagaaataaagtgcattcaaataggaagaaaggaagtcaaactatccctgtttgcagatgacatgatcctatatcttgaaaaccccatcatttcagccccaaagctttttaagctggataagcaactacggcaaagtctcaggatacaaaattaatgtgcaaaaatcactagcattcctatacaccattcatacattcctatacaccattcatacattcatacagcattcctatacaccaacaacagttattccgagagccaaatcacgaactcccattcacaattggcacagaaagaataaaatacctagaaatacagctgacaagggaagtgaaagatctctacaaggagaactacaaaccactactcaaagaaatcagaaacaacacagacaaatggaaaaacattccatattcactgataggagtaatcagtaacattaaatggtggctatactgtccaaagcaatttatagattcaatgctattcccattaaagtaccactgacattcttcataaaactagaaaaaaacaattttaaagttcatacggaacaacaacaacaaaaaagtcctgaataaccaaggcaatcgtaagcaaaaagaacaaagctggaggcatcacactacccaatttcaaattatgctacagggctacagttatcaaaaccacatggtactggtacaagaacagacacatagaccaatggaatagaatagagagcccagaaatatgtcctcacacctataaccatctgatctgtaataaagttaacaaaaacaaaaaatggggaaaggacttcctattcaataaatggtgctgggataactggctagccatgtgcagaagattgaaactggacgcctttccttaagccagatacaaaaatcaactcaagatggataaagtatttaaatttaaaacccaaaactataaaaaccctgaaagacaacctaggcaataccattcaggacacaggcacaggcaaagatttcatgacgaagatgccaaaagcaattgcaaccaaagcaaaaattgacaaatgggatctaattaaactaaagagcttctgcacaccaaaagaacctatcaacagaatgaatagatccctacagaatgagagaaaaatttttcaagctatgcatctgacaaaggtctaatatgcagcatctataaggaacttaaacaaatttacaagaaaacaatcaaccccattaaaaagtgggcaaaggatgtgaacagacacttctcaaaagaagacatacaagcagtcaatagtcatatgaaaaaaagctcaacatcactgatcattagagaaatgcaaatgaaaaccacaatgagataccatcgcacactagtcagaatggctgttatcaaaaagacaaaaaataacagatgctgatgaggttgtggagaaaaaggaatgcttatacaccattgatgggagtgtgaattagttcaaccattgtagaagagagtgtggtggttcctcaaagacttaaagtcagaaatacaatttgacccagcaatcccattactgggtatatactcaaaggaatgtaaatcattctattctaaaggctcatgtatgagtactttcattgcagcaccattcgcaatagcaaagacattgaatcaacccaaatgcccatcaatgatagactggataaagaaaatgtggtacatacacaccataggatactatgcaagcataaaaatggacgagatcatgtcctttgcagggacatggatggagctggaggccattatcttctgcaaactaacacaggaacagaaaaacaaacactgcatgttctcacttataaatgagagttaatgatgagaacacatggacacacaagggggaaaaacacacacttgggcctataggagggtggagggtgggagaagggagagaatcaggaaagataactaatggatactaggcttaatacctgggtgatgaaataatctgtacatcaaacccccatgacacatgtatacctatgtaacaaacctgaacatcctgcatatgcacccttgaacttaaaagttaaaaaataaaataagatctctgatctattttgatctagtgtgcatggcaagagatcagggcctaaattcgtcttttcacctatagataccaattgaaaatctatccttcctcccatttaatttcctaggcattattttaaaaaataacttaccaaaaatgtaaaggtttatttctagattctcaattccatcctactgatctataagttcatttttgtgccagcaccatcttgtcctggaaactgtagtttatagttgttctctgctttatagtataggcgatccttggacaacactgatataagctgtgcaggttcactcatacatggattttctgccacatctgaaataacaagaccaatctctcctctccctcctcctcagcctactcaatgtgaatacgataaggatgaagacatttataatgatccattttcacttaatgactagtaaacatatgttctcttctttataattttcttaaaaacattttcttttctctacattacttgattgtaaaatacagtatataatacatataacagtcaaaatatgagctaatcagctgtttatacaattggtaaggcctccagtctacaacaggctatcagtagttagatttttggggattcaaacattatacatacattttctattgtgcacggcgtctgtgcccttaactcccacattgttagagggtcaactgtacattttgaaactggaaattttatgccctccaacttcaattttcttgaaaaattgttttggttatttgaagtcttctgaattttcatataaattttagaatcagttcaccaaattctatagcctactgggattttgactcaaattgtgttgaatctgtagatcacactggagagaattatcatcttaataatactgaatcttccagtccatgaacatgaaatgtctcttcacttatttggatcttctttaatgtctctcagtaatgttttatagttttcagcatatctcttacttttttgttaaatatattcagaagtattttcttcttatcaatgtttgttcattgtctttatgctttattttcaagttagtgatccacagtagtcaatcttatttgtgtattctgtatttgtgaatttgcctgcctgctaaaatttaatacaatcccaaagtcaatacatagagtgcttttattctcatttgtggacatgcacagagtggcaaaaaaattgagccactgaacactcatgttcccaactgaggtttaacaaagccacactcttccatcttgtttcacttctcatactgtaaacaagtgtccttttgctcaattttgctctttatgttggtaattttgtggttataaatgttccccaaatataataatgctgaattgctgtttaatgttcctaagcacaagtctgccatgtgtcttacgaagaaaatatgtgtgttagataagctttgttcaggcacaagtcatagtgcttttggccatgagttcaatgttaataaatcgtgtgtgtatgtgtgtgtgtgtatgtgtgtgtgtataggaaaatgccttgttttattgcacttcactttgttgctctttgaagatactgttttttacaaattgaaggtttgtaacagccttgggttaagcaggtctatcatcaccattttcccaaaagaatatgttcactttgtgtctctgtatcacgttttgctaattttcacaatattttaaatttttcattattatatctgttagggtgatctgtatttagtgatctttgatgttactattataattgctttggggaaccacaaaacacacaaaccacacttactcgataaatgtatgtgtggtgactgctccagtaactggccgttccttgttttcctcttgtcgggcctccctatttcctgagacacgataatatgaagattaggctaattaagaactttataatgatctgtaagtgttaaagtgaaagaaagtcacatgtctctcactatcaatcaaaagctaggaatgattaggcttagtgagcaaagcatgtcaaaagcttagatagaccaaaagctagacctctcgccccagttagccaagttgtgaatgcgaagaaaaagttcttgaagaaagttaacagtgctactccagtgaacacatcacaaatgtctaaaaagcaacatagccttattgctgatatggagacagttttagtgatctggatagaagctcaaaccagccacaacattcccttaatccaaagcctaatccagaggaaggcccaaactcatagaatttatgaaggctgaaagagatgaggaagctgcggaagaaaactttgaagcagcagaagttggttcatgatgtttaaagaaaaaaagccatctccatgacatacaagtggaaggtgaagcagcaaagtgctgatggagaacctgcagcaagttatctagaagatctagctagaagtattaatgaaagtggctacacttaacaacagattttcaatgtagatgaaacagtcttatgttggaagatgatgccatctaagactttcatagctagagaggttcctggcttaaaagtttccaaggacaggcagactctgttattaagataatgcagctgatgacctatgttaagtcgaagccaatgctcatttaccattctgaaaatcctagggcccttaagaattatactaagtctatttttcctgtgctgtatacatggaaccacaaaacctagatgacagcacatccgtttagagcatggtttaccaaatatttgttgagacctactgctcagtaaaaaaagatttctttcaaatattactgctcattgatttacaatgcacctagtcactgaagggctctgaaggagatacacaaggagatgaatgttgttttcatgcctgctaacacaacattaattcttcagctcatgcatcaaagagtaattttgacttccaagctttattgcttaaaaaatacatttcataaggctagaactgctgtagatagtgattcctctgatagatctgggcgaagtaaattaaaaaccttctggaaaggagtcactattttagatgccattaagaaaatttgtgattcatgggagctggccaaaagatcagtattaacagaagtttgaaaaaagttgattccaaccctcatggatgatttcgaggggttcaagacttcagtggagtaagtaaatgaagatgtgtaaaattaaaagagaactagaattagaagtataactatgtaacaaacctgcatgttctgcacatgtgtcccatttttaagaagaaataaagaaaaagaaaagaagcggagcttgaagatgtaactgaattgctgcaatatgacagtaaaacattaatggatgaggagttacttcatacggatgagcaaataaaatagtttcttgagatggaatctactgctgtgaagatgctgtgagcaaggttacaatgacaacaaaggatttataatagtataaaaaaatttagttgataaagcagcagtagggctcgaggattgactccaattttgaaggaagtactactatgggtaaagtgctatcaaaaagtatgtcatgctacagagaaacctttaattaaaggaagattcaatcaatgcggaaaactttattgctgtcttattttaagaaattgccacaatctccccaactatcaacaaccaccaccctaatcagccagtagccaacagcattgagataaaattctcaaccagcaaaaagattactcactgaaggctcagatgattattaccattttttagtaatgaagtattttaaatgatgtacattgtttttaaaacgtaatgctattgcacacttaatagactacagtatagtataaacataacttttatatatatgcagaaacccaaaagtttgtgtgattcactttattgtgatatttgctttattgcagtggtctggaaccaaatctacaggtatgcctatatgtatatgcctatatttaagactttatgagatatatataatctgtttaagatactcatacaaaaagttacctattgatcagttaatgaaaatgtgaccataggctcataggaacataaaccagtactaccactaggaccaatggttcaatatttgttaattcagcgtttgtgactttacagatatctgttgaaacataacaaaatgtaactgtacatggagataaaatttatttctgcatattgcatatcttattgtgtgactttgccaaagttgtttattactagtagattgtatgtgtagtggtgggggacatgtattccttatcatttaatatacatacaggattatattttctgtaattaaaatacttttactcttcttttaaatattgatatactttatttttcatttttttcttgcttgattgcttgacaagaacatccagtgcagtgttgaattgagtagcaagagtgaatatccttgtcttgtttatgacattagaaagaaggcattctgtcaactttaagtagatgttaactgtaagtttttcatatatatcctttataaggtaaaggaagtttccttctattacaagtttgttgagagcttttgtcataaaagagttttgaattttatcaaatatctttctccgtttattgagatgattacattttttatatttactctatgtggcatattactttattgattttcagatgttaatctatcttgcattgtttaataaatcccatttgtattatggtgcataatcatttctatatgctactggattctatttagttatatcttttgataattttttcacatgcattagtaggggatattggtctatggttttctttccttggaatgtctttgcttggctttggtattggggtaacactggcttcatagaatgagttgggaagtattcttttctcctatgtatactgaaagaatttaatgaagattggtaatatttattctttaaattcttgatagaactcaccagtgacgccatgtagtctcagtttttctttattggaaactttttaatttcttcacttgttatggttctattcatattttctatttgtttttgaattagttttgggttatctcatctaaattgcctaatttaatgacttattattgttcatcatattctcttacagtatttttaaagtttctgtaggataggcagttgtaccccttatttcaatcctgattttaataatcttggccttctctttttttcttcaagagtcataaagatttttaattttgccaatctttccagaaacacaacttttgctttcaatgattttcgtcttttacttcattgatttatactctatttttaaaattattttcttccttctgcttgctgtgaatctcgctggttcttctttttctagtctcttaaaatagaaactaccccattggtttttagatattctttctttctttactatacaggtaattacaggccaatatttataaaattatttatttatttcaaatcttccactctatagatgaaaccttcaccacttcgtcactcaggaagcaacaggagaaacatgagaagctgggatgaaaacaccattttgaggaatctgtttgtctgatgctggtcagaacctattaccagaggaagcttccttatttaatccccttaggacaggggccatttgagagaaagagaataaaaacaaacaaaacacttaggcaatatgacagttttagtggacaaccctaggttggccccatgatacagaaccactggtgttcctaactgtgtaattccctcttcttgagtctgggcagaatttttgacttccttctagcatacacaatattgcaaaggtgaaagtattttgcagatgcagtagtcccaaatcagttgggtttgagttaatcataagggagattattgtgagtggatctgacttaagcaggtcaaagccattaaaagaggaactgagctctccttgttaccaagaaattatcctagctggtttgattattagtagcccatgtggcaggaaacttaagatgttctctaggagcttagggtgatctccagccaacagccagcaaaaagccaggaccctcagccttagagttactatgaaaacaattctgtcaacaacttgaatgatcatggaagcagactctttaagtccctggatgagaatgcagcctggtcaacaccttgactgcagcctgtgagaccttgaagagaggacccagataaactctgcccaggctcccgactcatagaaactgcatgtgaattataaacgtgtattattttaagccactaagtgtgtgataatttgcatgggccaacagccaactaataataaaattttatatgtagtgagatagggttacaagggttacaaatttagaaaccaatgtaaatcttattagactgaaatgctgcaaaagcctattttgccagagtttctctgcttgctttgtggaggatgcagaagactgacggaggccaaggtagggatggaggggcacataatcactaatctttccatgattgtgactatgcacacctgcatttctggagtccactctgcctgtagtgttagagcaattagaaaagcaaaaagagaagatgagaaaaaaaaccttaacaatggacatggaaaatatcatagaaaaaggacatgacctgtaatcccagcactttgggaggccaaggcaggtggatcatgaggtcaggagttcgtgaccaggctggccaacatggtgaaaccccatctctactaaaaatacagaaattagctgggcgtggtggcaggcacctgtaatcccagctacttgagacattgaggcaggagaatcacttcaacctgggaggtggagactgccgtgagccaagattgtgccattgccctccagcctgggtgacagagtgagactctgtttaaaaaaaaaaaaaaagaaaagaaaaaggacatgaacactgcatgaagagtaaaggacaatttattaaaactagagctgagaatctaacttttgggaaagtcaccgagatagagacatctaaattaaataagcagagataactacctcacaagtcttaggtttctaaataactagaaaagccttttcatgtgggttcagcaaataaaagtggagaaaagtcaaaattcaggtgagaaggtcacctatatctgaaagatatagagctaataattttgactattcagagcattttttaaaatgactacaaagttttcttaatgtttaaaattcttctattggtaagggtctttgacataaaaaatatacattgagaagtagaaaacttctgagaggtcctgatacagtaaagaaattattaaattataaaactggctgtgacacacatgcatgcacacacacacacacacatcaatttaaggattttctctttgataatttgacccctttgttcaaacaagcctatgacagcaggctgatggacctgcataaaaagccacatctgagggatttgagcctcagggagcagctgcctggggaggtttttgtttagacctaaagcactgtgggaggaaaattcttactctgcagacagtaataatttgcagtatcattagcttccacaggattaattgtgagggtgaaatcggtcccagacccactgccgctgaacctggctgggaccccagtgtctttattggatgcttggtaaatcaggagtttaggaggttgtcctggtttctgctgataccagtgaattaagtttattcccaagaaactgacactctcactggctctgcaggtgatggtggccctctgtcctggagacacggccaaggaggctggagactgggtcagcacaatgtccccattgcagcctgaaatgataaagacagataaattatatcagatatactgagactgtccccatgtaggcccatgcattggtgacacttgtaaccacagtcatatgcaacatcttgagtaaccagaaaacaaaagataactggggaacttacaacctacaatgagtgccctaaatccaacaaccaagaatccagagacacaaaaaacaatgatggccacatgagtttgcccgatgtttccctataccccctcacttggagcccagagcaggaggatccacagcaaaggagccccggaccctatctctgagagctgaactagaggctgctcctcaggggccctgacaagctgtctttaaggatgctctgagaagcttggaccgttgtctaatggcccaacatgcaaatcagctcagaaaagtttgagttgatgctcaaaggggacacctgctcttatttcacccagtgggagttggggctaacaaaacatttcctagggtagctcaagcatgtcccaagggatttggtgaccttttctattggatctttgcctgccagtctacttgagatgccatgtggaggagtgtactggggctgccctgccatttggatataagttatttcagaaatacttttgatttttcaaaattcatattttatatcattatcaataataatgcattttaagttatcattgtcagaaagagaaagcaagttgggtgggttttatgaaactggttcatatgggaaggagaagtttgttccactgagtaagtggtatttaaaacaagtctataaatgttatcatgatctggaaaggatgaagggggtgagcatgaaaccttgatgaagactggtaacctaaactaatcaaggaacttgcctcattgtggataaggcagggtctctccatctgcttagtcctgaaaccaatgctgtatccaccagaggccctcagaggcagaagagtcattgtagtggatcctattcagagtggagaataaccatcccccaactcccactggttccatctgccttgccactggaagctggggctaaggaagtccatcttctcctacagcaagatatggtgtccacaccagtcagctggcactctcacccatccataggtgaaggttttcccccaacaaaaccaacttaaaatgtctggaagaagggactgcatcttcaaatgtgcagacaccaacacaaggctacaaggaacatgaaaagtcagggaacatgatgccaaccatcacttctctatgagctccactccaggactctattctgttacttgtgatggagttcagggccagagaggtcccactatactgcttccaactgtgcgcttgggtccctgattactcagttatatttttcattgatgttaacatgcatattagctctagttaactaaaagttttcttttatcactctgggaattgtttttatgcttttaaatttttattttatttgatttcaactaaaataaactagtggcttcccaaaggatctaggtagaactaaaataatggtctttctacaccttaaatctacatttttataaacagctgaaaatgaacagctgagaattacagctacaccttagggcaaaggagatgaagagcgggaacttagattagtgtggtgagtttgagtggaaagtactataccctcttgtttttcctaaatgattaaattctgcttacctagctctattcccctagaagaaagcaggaataatggaatttgagtattccttgaaaaaacaaagaacattttcaagaaatttaagaagttttcaaactttaacctttcagatgtctagtagatatctctggaaaacagggcaagcatcaatttgtggattgagaagaaagataaaatatttcagaggagccaatatgccatgagaaaagtcctgaaaaactccccctgaacccttggaacttttgtgccatgattagggttgggacaatccctgagctttgccccctcctacaactctgggtggaggaggacagaagtagaggtgggaagtaaaaggggtgaaatttgcatttttttattaggccacctagatgaccgatcattaagaaggctctagaaaatagagacaaacttgaccactttaagttgttcactgtcccatcctctgtcttctactctttctccagcaaccaagtgataactactacacacaacctgcaaggatacagtcctcagactcagatctggggtggaggtagggaaggtaataataaaatgcacccacatgtgtttggagcaatcaagaaatattgaactataccatattttggcaaataaaagacttgggtaaagcaaccccatcaaggataagtaatttgaaatgaaataatactgaaaattacaaatataccatgggagagggctatatgactgacaaaaatacatagcaagtaaataataaattagataactcttctgaaaatgatgtactctagtaaaacaaaagtattttctgcagcaaatgattgtaaatttagaagacacaccaaaaaaaaaaaaaaaaaagaaaaacacttaaatttattttcaaggatgagatagcaagaaaataataggtaaaataaatgtgtctggttacaggtacaggattaaaaaagtaaagcagaactagtaattttaacatagaaaaaatgtaataaggcaaagaaataaatggagtcaaagacacataaggtaagcttagtaaagggataaagttcagaaaaaaaggcaaaaaaaattacagataattatagaaaggatagaaaataggcacccaatatacatggataattgatgtgttttaattatggaatttaataaaatggcatatgaaataaaatgtaataacataatgaccagaatgtcaatatgtttaagtgaagatatgttaaaacaccccaccataacatatatgtgaattacatatttattaaatacagaaatattaaaagataaatctataacaaagaatttatatgaatatatatctgactttgtatttaaagagactatttataagccagaagaaaaaggaattctaaaagaaacaaaaaaatataaaaagaaagcaacagaagcctaatataaagtttctaagtagaagttttaaatcaatgtcaaacacaaaattatacactgaagaaaatcaatacatgtaaaaataaaagtaaactataacaatcaaagacatctcacaaaatgatgaagaaagcaaatttaaattagaaaaataatccataaaatgaaaaattaataaattggacctcatctaaattgaagtttttgatctgaaaaaaaatctctattaaagggatgtaataaattgaaagtggacttgtgtaatttagcaaatgaactcttgagcaattatctcagagaaataaaacattattatacagaaacttgtacacaaatgttcacagaagctttatttatagtagctaaatcaaggaaattacccaaatgtctttcagtaagtaaacagttaaataaactggggtaatccgtattatagaatacattcagaaataaaaagcaataaacaattgatatacccaactttgatgagcctgaagggtattacgccagtgaaataagccaatctcgaaatggtacttattgcatgatgtcttttatgtggtgtttgccaagggttaaggatggggtagagaaggtgagtgcggctataaaagggtaacaccaggagtcgtgtggtgatgatttagctgaatttcttgattacagtggtggttatagaaggtcacataaatgattcattcacatcgagctacacacacataaacacaatcacataaacaaacaaaaattgtgtgcgtgcgtaacttgtgaaaactgaataagttctatggatgacaccaatgttaatttcctgtctttggtattgtactatagtttgaaagatgtcaacactggaggaagttgccaagatgtatgagacttctgtatatttctttgcaacttcctgtgaacctataactatgttatagttaaaaaataaaaagtaaaaaaaatcttaagctttattacttgaaaaccttgaaaaaaatgaattgccctttttctatcaaatgattggcaaaaaaacttaaagccttatgcctccctctgctggtgggaatggagagggattgaaaagccatactttggtggttgcaatgtggatttctactgtttcctaagtaatctctgctcactattggagtgaaatttaaaatacgtacacttgttggcccaaacttactactaagaaaattgcctatagaactaataactccgtgttgtctaaggaaacatctgaatgcctatcagtaagagatggctaaatatattgtgctattttcatattatgaaaaattatggctgcctctgcctctgcccctctgcccctctgcccctctgcccctctgcctctctgcctctgcctctctgcctctgcctctctgcctctctgcctctctgcctctctgcctcactgcctctgcctctgcctctgcctctgcctctgcctctcgctctccctctctgtacggtgtccctctgatgcccagccgaggctggactgtactgccgccatctcggctcactgcaacctccctgcctgattctcctgcctcagcctgcctagtgcctgggattgcaggcgcgcgccgccacgcctgactggttttcgtattttttggtggagacggggtttcaccgtgttggccgggctggtctccagctcctgaccacgagtgatctgccagcctcggcctcctgaggtgccaggattgcagccggagtctcgctcactcagtgctcaatgttgcccaggctggagtgcagtggcatgatctcggctggctacaacctccacctcccagccgcctgccttggcctcccaaagtgccgagattgcagcctctgcccggctgccaccacgtctaggaagtgaggagcgtctctgcctggccgcccatcatctgggatgtgaggagccccctctgcctggccgcccagtctgggaagtgaggagcgcctcttcccggccgtcatcctgtctaggaagtgaggagtctctgctcggccgcccattgtctgggatgtggggagcgcctctgccccgccgccccatctgagatgtaaagagctcctctgcccggccgtgaccccgtctgggaactgaggagtgtctctgccccgccgccaccccgtctgggaggtgaggagcgtctctgaccggccgccccgtctaagtgaggagcccctccgcccggtagccgcccagtctgggaagtgaggagagtctccgccctgcagctgccccgtccgggaggtggggggcagcccccgcccggccagccgccccgtctgggaggtggggggcgcctctgcccggccgccaccccgtctgggaggtgtacccaacagctcattgagaacgggccatgatgatgatggcagttttgtcgaatagagaagggggaaatgtggggaaaagaaagagagatcagattgttactgtgtctgtgtagaaagaagtagacatagaagactccattttgttctgtactaagaaaaattcttctgccttgaaaaaaaaaaaacagaaaaattatgcaatttttgaaagaaagggttaatttcatacaattgatctgtttattatacaatatcaagtgtaaaagcagaaatacaaaaatgtttttataacacgtaatccagtgtttgagaacctacaataataaccacagaactatagcatacacaatatagtaaatttttttcatatattaaatatgattcacgtttcttggggtgactatagttttctcactaatagaagaacagtaagttgattaaaccaaaaatcatgacacaattatatagggaggaagtcagagcactctgttcttaagctctgctctagggagaaactatttaaccagcctaatgtgctatatacagttttattattatctaactgactggggaaagagaaatactcaactccatccagcactagcatccagtcccacctacatgggtggagaaagaagcaaagagacacttgtgatgtttacagtccacagacataagctcactaaagcactgaaccctaagcatagaagtatagaatgtttctcttcccctacaccttacccccatattattaaaggcctatttctagcacttcccttcacccaatatattttatctggctatcaagtaaaaattataaggcataataaaaggcaaaaagacatggtttgaagataacaagcaagcttcggaaccagacatggcagggatgttgtaatttttaatagaggagcaatgtaaactgaaagatgaagatcccaagaaaaagcaaaaaaaagaaaatgctagagattaaaaaacaaaactaaacagaacactgtaacagaaaggactgggtatggctggaaaaacaaagtctgatcttgagagtatattaatagaaatctccaaaactgaagagaaaagagaataaagactgaaaaccaaaggcccaagaactgtgagacatatacaaaaggtgttacattgtttaactctttttctctttagaaaaaaaaaaaagtgcagtttgctgccagcattcatataattttacataaacacactctttgaggctgaagcaaatctgactgattttcaatgtgaaataaaatataaaatccgttcttggaattatttctaaacagaacttgtctctaatcctaatataacagaaatgtatatgataatcagtatttaataattttttgtgtggtaaatttcaaagcacagaacaacataaagcggaatatcacattccacacaaaaatatcacgtttctcttcagattgtcttgctaggctcgtctttgcacaagcagcaaactttgcagtgaccagttggatttcgctcccctgatgttggtgatatctcttggggaaaggtcttccatacaggtgaagaggtatgacatcttcagagcaaggatgacctggaagactttgctgccctggcctgtgatgctttaagagcattttttcaatcaacgtcagtctgaagtttatatggctaattgtgtgctcaggattgtccttcttgaacagggtgtagaggttcattcagcactgtaatgtttagaaggtggtgaaagaatttcttagaccgaatcttgtgccctttgaagaagtgagcatcaaatcagctgagtccactgctcccatcttctcactatagtccacagtggcatatgacttcttagttttctctccatttctgttgtctacttcaatcacagtatcattgtggaatgttgaccacattctcaccttcttctttttgaggtaaacactgtagctgcaagtgctgccagcaagtattcttgggcaaaaggtaaatgggttaatggacatgaagaaaaaggaggaggacggggtggaggcgtggtaaacaaaaccatattgagtgaaaatttttctaaattaatgtcagatatcgaaccacagatccaagaagatcaggaaacaccaagcagtataactgccaaaataagcaaataagcaaaacaaacaaacaaacaaaaacaaaaaacacttgagcatataatttttaaactataggaagtcaaaaacaaagaaaaagtattgaaaaggagacagagagagagagagagcatgaacataagagaaacaaacctttcatgtagaggagcaaatataaatattgcatccaacttcttctgtgaaacaggaagcattcttcacttcaatgcaagcaagaggagagtagagtgaagtatgtcgtgttgagagaagaaaaccaccaacctaggattctgttttctatgaaatcatccttcaaaaggaaatgataaatgatggctttctcagacaaacaaaaattcagaaaaatttgttgccagtaaacatgctttgtaataaatagaaaaagaaaagttcttttgagagaaggaatatagtataggtcagaaatttgaatttacataaaagaagagcatcaagaagaaataagtgagggaaaaattaaggaacatatttttcttattcttaactgatataatttttttcaaaataatagtaatgtgattattatgcatgctgatgtatacatttacatatataaatacacacgtatgcacatatatgcatacttatttatacttacatataagtgaaatgaatgacaataatgcaacaaatggaaaaaattaggaatactttgttattatcaggtactcacatgacctatgaaatggtataggagtatttgaaagtaggcttggattagttgtaaatgtatattgaaaacttcagagcaacactaaaagaggttaaaaaatctaatatgctaataaaggagagaaaatagaagcgcataagatgctaaattaaaaccataaaaaagcagaaacaagtagaagataaacatagaaaaaaaacacaccaaacaataaatcgaaaacagtgaaagtgtggtagacattaatccaaggcattgataattagttggagcatcaagtgtctaaatgtacaaattaaaagatatgttattagagtgtatcaaaaaggaagattcaactatatggtgtctataagaaacctaattaaaatattaaagcacatatagattgaaaagtatatgaatggagaaagatataccatgctaatattaatcaaaagaaagcacaagtagctatattaattttggaaaagaagatctcaaagcaaggaaatttatcatggacagaaagagcattacatatgaaaaaggggccaattcttcaagaagacaaagcagtgcttaacatatgcgagcttaacagcagactgtcaaaataaatgtggcaaaaactgatagaactacaagaaggtacagctgagtccacgattacagttaaagactttaacacttcactatcagaaatgggtagatccagcgggctgaaaacccataaaaacagtcaaactcaacaacactatcaatgaactatgtataattgccatgtgtacactattttgtccaaacacatattttttcaagatcacatggaatattctctgtgataaacttaatgccaggtcataaaacacacagtaacgtattttaaaaaaatagaaatcattcagtgccttctctcaaaccacaatggtattaaaatacaaatcaataccaaaatgtagacaatacccaaatatgtggagattaaacagcacacttccaaataacaaaagagttaaagaagaaatctcaggagaaatttaagaagattttgaactaaatggaaataaaaacatgactcatcaatatttgtggaatacagcgaaagaggtgctgagagggaaatttatattatcaaatgtataaattagaaagaagaaaaatctaaaatcaataatctaagctttcactgtatgaaagtagaaaaagaagataaaattaaatctaaattaggcagaagaaaggaaataaatattagagcagatatcaaaaaaattgaaagcaggaagtcaacagaaaaaaaaacattaaaagctaatactataaaaatacaaataacattgataagcctcaagccaagctaaggaaacacagaaagcacacacattgctaacagcagaactgaaagaggggacatcactacagatcctatgaagcttaaaaggatactgtacgactattataaacaatgctatgatccaaacttgataactttgatgaaatggatgaagtccttgaaagaagcaatctaccaaaactaactaaaagaaatagacagtataaactgccctatatatattttatatatttaataaactgaataaataactaacaacctttttaaaaataaagcaccagattcagatggattcaatggtgaattctaccaaatatatgaggaagaaattcttcaaattctccatctatttcacaagatagaagcaaagggcatacctcctaagtcattctgtgagggaaatactagtctactaacagaaccaggcaaagacattacaagaaaatagaactacaaatatttctcatgaacatagatgcaaaaatcctccaaaaagtattagcaaatcgactatgacaatgtataaaaaaacactatacagtatagtatgccaagttggatttatgctaggtatgaaaggctgattcagtagtcaaaaattaattgatttaatccaatgttaattcttgtgcatccaacacaattgagtatccagagaatgggatattatttatagcctaaataaacaagctatcaaaccacgaaagaacatggaggaaatttaaatgcatattactaagtgaaaaagtcaatctgagaagactgcatattatattatttcaactatatgatgttctgtaaaagacaaaatcatagagacagtgaaaggatcagtggtagttagggatttgggagggtgggggatgaatgggggaggtgaacagagaatttttagggcagtgaaactgttatgtctgatactacaaagatggatatttcctattatacatttttcaaaacctataacatgtatgacatcataagtgaaccctaatgtaaactaagaagccctaatctaaactctgggtgataatgttgtgtcaatgtaggttcactatggtgggggatgttgataactggggaagctttgcctgtgtcagagaaagatacgagaatctgcactttcttctcaattttgctgtgaacccaaaactactctaaaaatgagctctttaaaaacataacttcctcccctgcccggccagccgccccgtccgggaggtggggggcagcccccgcccggcagccacccagtctgggaggtggggggcgcctccgcccggccgccccatctgggaagtgaggagcccctctgcccggctgccaccccgtctgggaggcctaccgaacagctcattgagaaccggccatgatgacgatggcggttttgtcgaatagaaaggggggaaatgtggggagaagagggagagatcggtttgttactgtgtctgtgtggaaggaggtagacattagagactccattttgttctgtactaggaaaaattcttctgccttgggatgctgttaatctataaccttacccccaaccccgtgctctctgaaacatgtgctgtgtccactcagggttaaaatgattaagggcggtgcaagatgtgctttgttaaacagatgcttgaaggcagcatgctcgttaagagtcatcaccactccctaatctcaaatacccagggacacaaacactgtggaaggccgcagggtcctctgcctaggaaaaccagagacctttgttcacatgtttatctgctgaccttccctccactattgtcctatgaccctgccaaatccccctctctgagaaacacccaagaatgatcaataaatactaaaaaaattaaaaaacaaaaaaacaagaaaaacataacttcttaaaaaataattagttatttccactatctaatacagcaacttgaattgtgggagaatgagtaacagtgaaagatttgtcatattttcttttattataaatcaattattaaaaatattattcttacaaaataatcttttttgaatttcagagtattgctattgccagtaaaagttaatgataaacctttaaaaagtctgccttgtaattggttattttgtctcaaaatctgttgcccttaagtatccagaccatgtaaacttttgtaagaattcttctttcatcagaaaaaggctttgaaattttcttatactatctgggagtataatattcttaattctaaatgggaacctcccctttctgtatgttaacataccgtgccaaaatgttgacaacagcagctagagtggatcactccacactggacaaagataagaattgataaagtttgtaagaacagcctatgtttagatctaggtgggaagcaggccactgtgtgtctccaatcttggtcacattcaactgcatgaggacagacttatataggtcagttttcttgtagttcaactttcttgccaaatcctgtttgggggtccataagtgtaaaagcacatgtaatatatatacatatataatatgtatgtgtgtgtgtaataatatatatattacatgtatacatgtatatatacatgtaatatatataccttatatatattctctctctctctctctctctctctctctctctctctatatatatatatatatatatatatatatatatgacttgggaaagaggagtcttggaagtggaattgcttgtgtccattaagctggattcagtgttcgtagggtggagtttgaccctatttgtaggggatttgggggcttatcaaggaaaaagaggtgaccacagagtagcagtagcacacacatttattgggtgaaactttgaggggctcacagggacaagtccttcacagcaggagtctttgcagatgtgaaggtgccaggttgctattcagaaaggaagggaaacaagaaaacacctgaggaaagggacactggagaaaggggcttatgtgtctaggtgatgtcacacagcagcatgatggagagcctctgggttagaaagctcaagaggacagttgcagtttgggggttttattgcctgaatcttactttatttattggcagcaggtgaggtttcctggcatatgcaaagcaagcagtgtctaaatggcaaaataataataataataaaatttgagggctatttttgaaataattagttgtgtaaaatttgaacttgatgatagtagtttaaaaataaacctgcagtttagcaatacacaactttgagggcagtaaacagagctttgattcatttatataacactgttgcacatcctataatgtttgttctgttgactttatcaacccaaactgtccaaacctataatgctttgcactagaatacatacccagatgtgtggttccttcccatacccaaatggaggttccttatggcattgattgtggtgatggattcatgggtgtgtactaattttcaaactcatgaaattgtgtacattaaatatgtacaattttttggtatgtcaattatctcaataaaatggttttaaaaatctcaactagcagagggatattccccaaatgcagattgtctagagtggattcctggcttcaagacacttgtaatgaaagctggttgtctcttctaaataactataaattgtcacccagaagaagtaaaattcatggctaaccattctgttttacaggttcagagcaggctttgtggatgtgtttatcctccgaatttatatattctctctaaacactgggagacgttagtatgtttacatgtctgacttctctgggttgtcaagatcccatttttgatctacctaatatgaatttgtatccaaatgtttaaattcttttctttccttttacttgaagtaaatactaaaaaatcctacagagatactcaacccaaccataaaaatgagtttgagaatcatgtgttggcgatgaaggctttttatctgtaaatgctaaactttctgctgagcccagctcacccatggactaactggataaagtgagacaataattccattgtctacctgagcattccccaccttaaaatttttaactgcctctaacatctctgctctaggcttactcttgaagacagggtcctctatcttgaaaagaagtttttctcaaaagccagagcttgtttaataattttcagtttttttaatgtgagatttgtctattccaccttgtaagaaaatttgatttgccagacaaatgaaaagtggaaaactcaagaagagtttagagatagaatcaaggacaatagcattttaaactgtgggtacatctgtctttgaaataatttgtataaatatacggaaatgacaaagtaaataatttttttgtatttttaatttagataagatagtttacttgcagaaaaatggagactatgaacctggaattctcaaattcaatgttttttcttccggtttaaataatttcaagaatctataaaatacttacataaactttaaatacagaaattttaagagcttcagaaaaaatcgaccaaattaaatcccttacactagtttctgaaatcaaccaaaattgtgttttaactactgtgttttatttccaatgaacaacaatcaaaaacattagataaagtaagatgcaataggtgaatgaattgtttggtggtcactcttagttataatgagataataatgagacaatatcttcatcagaaagtggaaatggtgactttctgccttaagggagcaggggactcacagttgtaaacttcccctccgtcttgatctttcttgtgcaggagccgagggtaatccactgtttcagtggtctttgagcagcaacagtcctcatctttctgtaattctagaaatgctcatactgggctcttctaaaacactttttatgctaaatagaaaaataaagatcagtaataaaataaaaagaaataaaataaaataacttatgaactcctggaagtagttgtgggataaaattataaagtttaacaaaaaactagaacctagaacaacttactaaaaactaatttagtcaaattttactcttattttgtattcttgccctcacaaattaggaattttctcaacccaaagaatgattgcctttcttatattctggaatcttaacagccataggagaaatttgaaactatgagaatttatactaaccagttatcctaggaaatctggttacacaaaaattaactatttagagtaaaataaaaggaaaaatttgttgatcccatggaaataattaactgaatatttgctggtcaataaagctaatcctaagtatgcccctaaataacagcgacatcgttgtttctggattaatgctaagttttcaagatccattaaaagtaatttgccttggattcagactcatagtattggtcataactgtaattcaactaccaccagaacttgtagaagacaacaacaaaaaagaaggggtaatgagaaatatgttatgaaatgtatcccaatgttaacatttatgaaggagagggaggtgttttatgaatatctattctcatagcactgatatcttcaatttgataagcaaatacaaatctttaaaccagaatttggaacagggtaaatatggctctcatgaatttgacttgactgcgtcctggggttgtattgacataaggactagatggaggtacatacagcagaagtaatgaaaattataatgtcaaattttagagcctcctaactaaagcactagctcagatactgtataaagatgaaaaaaaagttatgtgaaaatgccctggaactgtttctggactgcctagtaacatcctggctgtggttggatggctgatttaccccagctggaagtatcagtattgtacagctgaaatttgtgggcactctcctctgcagttgtcaccaaatggcttatacttttattttcaaaatccacttgcaattctaagagctctccttttctctcacaaaaggcagttgaggcaaatcaaagacttttgggataaaatgttatctccactatgaattgacaaagtctatttagatgtttgcaaactaaacattttcactaattgctgtgagtcacactccccctgagtatagcttgtgtagaatgcaatcacaggtatgtaagtggaggtttggtataaccactaatggagaggtaggaagttagaaagtgggaaaataccaatttctgaatattaccaaacgttatcgtgttaaaaatataacaaaacctgctaatcctaacatatacccaacctttgtagccatgagtaggcctcaattttcttgctgttatgctgactaaatctcattgacaaatgcaggaaacacagggaggatcagaatgcactttccaggtagctctctcttctgtcatgtctagttgctcagagagcactttgatcaccttcattcttctgcttgagccatgtgaaataaggctgttacagtgatggggccagaacagtctggatcttcctgcaaattattccctgcagtcatctaacatctacctgtgaagccaactcagaatctgccatgcagacagtccacgtgcaaacacttgtggatggctgggccatcccaagtagggaggtttgtgttcagggttttaccactgtgtgaggaccttgcagaccctgttcacagcaataaaccccaacatcctcagcctccactttgctgaatttaagtgtgaaacctgtccctgacctgctgccactgaacttgtttgggactccatagaatttgttagaaattgtgtagataagaagctgtggagactggcctggcttctgcaggtaccaatccaaataggtgtttccatcactatgcaggaggctctgactagacctgcaggagatggaggccggctctcccagagggatgggcagggagagcagatgctgggtcatcacaatatccccactggatcctaaaataataacagtgagaagtacaaggttacatacaaacaatgtgagacatttttataatttagttttattgtatacgttaggctacttttttgtgtttgattagattcatacactacatttatccaatatccaaaaataatccaataattaaaggcacaaagtggcctctttgtttttgaagttctcgacagtgaagttctttttccttgtggctcgttcttagttcttacaggtctgaatattaaattccctttgctggaggacaagaaatctgcatctgacatgtagacagaacaacaaatgggaggctgcagattccacagagctcaccctccagtcccattctcctctcttctgtccttaccagggacccagagcattagcagccccaggagctgagcagggagcctcactgtgagaaggtgaactgaggagtcctgatcagtcaaggcaaggttagagctgagcttttatctcagactcacaagggaaggtcttccctaggggacaacatgcaaatcccctggtgagtgaagcagtgaagaaatatccagttggggtcgaagagtgggcttcttatgtaagcaaagtgacacagaatatcttttgtgttgatgaaaccaaaataaaatattggtgttgcctggcttagaagggtgacattctgaaataccatgaatcaatgtggaagacactgtgactgcagcctgtcactcttcattgctgatgcaatggagattgtgatgatgaagatgtgtatcaatctttaggtggtgaataggctttcttcttggctccacccagctaattctgaggaggaactagctctcactaactctggtgctcattgatagaatgtctctaagtatcaggatgaacttgaaacagttccagggttatttggctgtggttgcaaggctgatttccctcagcttgtatttcactgtagctggtatttctgggcacttggctctacagctgccattaaatggcactaaatgatgccccagtgaataagctagctgtaatgtgtgcttcgtaaacaaggagaaaattagagttcacgggaagaggaatgcatattccattccattgtatctaatgcatgtcgttgtctttgaagggaggaaggccttggtaggcctctttggattctagaggcaagaaattctgtaccttggaatactgtactggctcactgaccgactgatacacgagtcagccagccttgagtgggacccggggcaaaaaaagggctctgcagcaggttcagcctgtagcacaagcagtcctgcctctcaggccagtgcagatgcagatgaattggacagcacaatcaaccatctggacataattgacacttcgagaacactccaccagcacagcagattgcataatcttttcaaaaaatttactaaaatagaccatattgttaccagaaaaggggattttgattcaaactccaagagaggattcttggatttcatgcaggaagaaattcaaggaaagttggaaagtgcagtgataagagagaatttattgaaaattactccattacagagtaaggcatcctcagaaagcaagcagaggaacataccgtctttaagtttttcttatataggagtgtcgtctatgtaaagactaaactaagctgtgcctacatgcggatgagcagacattacgacaaaatttattattctgttgatttaagggaaactattcttgacattctagtgtgttatcttggaaataaggactgtgtcttgcaaagaaacatattcattggggcaatgtgttatcaaaaaaaagattttatctacttatgatccaataatttagactgacttcaacagatttttttaatgacaaaaagcagaagatggtataagaggaaaatacaatacaacagaaaacacaagctattataactcttgcttcatggatttttacatatctattagacatatgctgggtatatgtgtgcaatgataatctaaaaactggatgctaactagcttaaggaatgcctgcattacactgagtcttgcccacttttccaattataaacagaaagctacagtactatttgtatgagtatcaaaacttttagctgcctgagatagaggtaaagaagatttactgagataaaagccttggaagtagtagagatttgtcctatgatgttatggctgttgctgtggttgccgttgttaggaaatacagtgggagtgaaagcaagattgacaagctctgctcttcctcatactcacaaccccctctagagatggacagatggtggtacaggaatctctgacacctcttagaagtcttttgctctttccagaatgtttcctgacaagtattgttttgagtcacagattaggtgaaactgggtgtagaagaaaggactagagcaagggaagaagttttccatcccagatagttgttgtaggaacagggaaatggaatttttcatagatttatgccacatttctatcatgttggggagagaggcatcaaaccaggctcattcctgaaagaatcattacattattttagagagaaagaactacaaatttcttgtcaaatagatgtttaaaattcaaagctactgatttttttttttttttttttgagatagagtctcgctctgtcatctgggatggagtgcagtggcacgatcttggctcaccacaacctctgtctctctgattgaagcaattctcctgcctcagcctcccaagtagctgggattacaggtgcaggccaacatacctggctaattttcgtatttttagtagagacggggttttgccatattggccaggctggtctgaaactcctgacctcaggtgatctgtctgcctcagcctcccaaagtgttgggattacaggcttgagccactgcaccaggccctgctgatgtattaatattattcatcttcttgaatacaccaaatggtaaagtgcaaatccacactttaaacttgagatttctactcctatgtaaattatactagtgaggaacaaaaaaattctctattggttgggagatgatgtttgacagtggtcagtttgtgaagtggaggcttacgtcacagtactttttacagtattgcatataaacatgaatgtcctcatacccagaagaatcagcatttctcatgagccatattaccaccaagaaagaagtgaattgaagcctgtgactacttgatgaagggtgtatagaagagggaaagaaaaaggacacaaaacacaatattgtaagtggaaaggagaaagtcattacacagcctataagagtaaaaaaataaagagaggatattatgagtaattttatgtcaactgacttgacaaaagtggtgcagggcaggttcttggcttcactaggaaggaatgcagcgtaagctggtggtagaagaaaacagctttactgaggtggcagtgttacacctctgtgactgctcttgtggagcagagctaccccataggcagtgtgccaagagcagtagcatagggcagttttgcagtcatatttatcactgcttttaatgacgtgctaattaaggagtgggttattcagaaataactagaaaatgggcagtaactttcaggttttgccatggcaatggtaaactgatacggcactggtgggcatgtgttatggacaggtgcttccagtgtctcttccttgtgtcacccactcttcaatctggtccagagttgagtcccacctacctcctacctcattgccccttggagattagatactcctccttaatcttaaggggactgcagaagagcagagtcccttttctgtgagtgcttccttctgactttatgggggcaggccttccctagcatttgaagagtaaaaatctttggtatctgaactaaggggcccagtggcaggatgctttcatttgtggggtcagaagacagaatggattgaaagacttatgacggaccgtatcatttttacatgaaatttagaagatataaactttactaggaggttaaacaagaaaattataattggaagagagagaaaaattaatgctcctatgtccacccacagaaccaagttgttaatctatgtgtttgcaaaacaacagccttaagttttctaggttttataaatggaggttgtggtgtccaccttttgtgcctgcaggatctcataagaaacaggtttaatcctggacagctagtggcttcctgaagcctaacagtagttggaataattaagaatatctggtaagggcccctttattctgattattattgattcttgggggatcattttgttgttgttgttttttaagacagagtctcgctctgttgcccaggctggagtgcagtgacacaatctcggctgggctcactgcaacctctgcctcctggtttcaagctattttcatgcctcagccttctgagtggctgggattacaggcatgtacccccatgcctaggtaattttttgtaattttagtagagatatggttttgctatgttggcaaggctggttttgaactcctggcctcaagtgatccacccacctcagtctcccaaagtgctgagattataggcgtgagccactgcacccagccagttccttctttttaagtttttcataagactaagtcttttggttaaacagaggagctattattttgttttgtggaaaagggcactattttattttcataattttaaaagcccttttgaatctggcctacatttcaaacaggggtggagcaaggtgtgtctgactccctgtttcccaccatggcttgagttagattttttttaggtttctttggtagttcctttggccacagagcttggaatgaaaacatttatagccaattaaatattttaggccagacagcatggaggtgggcaggcactcattagcccttaagcaggcagatcatgaggtcaggagatacaggccatcctggctaacatggtgaaaccccatctctactaaaaataaaaaaaattagctgggcatggtggcatgtgtctgtagtcccagctactcgggaggctgaggcaggagaatcccttgaacccaggaggcaggggttgcagtgagccgaggtcgcaccactgcactgcagcttgggtgacagagtgagactccatctcaaagaagaatatatgtatttttaaagctgtataaaaataaaaaagtaaggccccaaataaggttatatatgttaaaaaaccaagtacgtagaataatactatactgggggaaaacattgcttccagagacgcctaagacaaaacactttagcatcaagtccgcaacaacagtcagaaccggaggtgaaaaagccacaggagctgatgaagaagcaaaaggagacagcaatgatctcaggcctttttaaagggagaataagctgaaagcagcaaaacaccacagttgaatctctaagacactaatctcagaagttttaaaagaaactcattattgcatcaaaggcaaaattttctgttttactttttgtttgtttgtttttcgagatagtctcactctgtcactcaggctgcagtgcaatagcacaatcttggctcaccacaagttctgcctcccgggttccagccattctcctgcctcagcctcccaagttgctaggattacaggtacgtaccactgtgcctagctaatttttgtatttttagtagagatggggttttaccatgttggccaggctggtcttgtactcctgacctcaaatggtccacccgcctcagcctcccaaagtgccgggattacaggcatgagccactgcacctggcctgtataattttcaataatgtagcaaattaataacttaagaaaacccagtttcaatatgcagacgattttctagaaagtgactgggccatcattgttctcatctcagatttccacttcctgtatagaaggtgtaagaagaggtagcaagacattatgaaactaaattgtaagcatttgttagtgaacaaaatatgactaaagcgctactttttttaaaaaatttttatttattgttattattttttgatacagggtgtcactcttttaccaggctggagtgtagttgtgccatcttggctcactgcaaccttcgcctcctgggtttaagcaattctcatgcctcagcctcccaagtagctggaattacaggcatgcatcactatgtccagtctatttttagtagagacaacacttcacagtgttggctaggttggtcttgaactcctgacctcaaatgatctacccacctcggcctcccaaagtgttgggattacaggcgtgagccaccatgcccggccttaaagcagtatttttattaaataaagtgtagaagaaaaagtgtaaataaagtgacaaaaagaaaacacaaggccgttatggaaaatgataactttagggaagaaaacaagaaaaggcaaaccaagattcccatagggtgagtctccaatccacaatcctcagacaaatgtcaatgctggaaaccctggagcatccagggagtgaccgaaaataccaaatgctgaaaacccagagtacccgcgtatcagcctatgagtgtcccacaccaaatgccaggaaaccctggagtatccaggggctgaccagtgcagaaaatcctggagcctcagtggggtggccaacagtgagccccaaaggcctggttggggccacagaacaatgtgactctggcttcttagagtcaacagaacaggagaattcttacatccaagtgtcctgccttaaacaattgcacaaacataattagtagggacccaaagaaaaaactgcaaagcaaacacatatatcagggtagaaaataagataaattggctaatggatagataaaatggcattagaggagaaatgactaagagaaggagcaatgaggatgtagtcaggtgtgctatgggggacttcaaatggactatttagccaaaggccttatttcctggatcatctgacatagggcaggtgggtagatgggacacttacaggtgtgcaggagccaaaatggtgccaagcagtgtctaacgtggggcctgtgtgaagatctctccaggccccccagcttgggtgggttgagctcccgtgggtgaactggtgcatgcagcagctggcctgcatgaagcagtggctctgtggccacttacctaactgctcagctccaccgcctgtcaggaaagatgatggctcttaaaacagcctttggctagtgttaacagctctgcaatgttagcaactctgtagctttgctcgctgtagtgctgatccccatcacaccctctctcactgatcactgtcttgccacttctccaatagctgtcttgcccattgctgatcgctatgtccatcttctcacaaaatgccatctcttgctgtctcttgctgtcttgcttctccgctgtttccactgactcactggcacatcaaacgctgcctctcaccatgtcacatttatcctccctcctcattaaacatccatcttcatgtccagcccttgcatcaccaggctgatgtctctgtactgggccaggtactggagagtattgttcctccatcttcaccattaagccatggttctctcaaatcaaaccttctcactgcaccaattttgccaagaaggtttgctgtgcactggttgccaacttacccaaatccggtgacacacagcacccatgcacaaccagttacatgaagtggattactacttacagagagtcagccagagagagcacaaagctgcggggacctgattgacactagactgtgtgtaccccacaaggactgcagctgagggaccctggaatacagcccaccctgggttttatgtcttagaatcacatgacacactgggctagagtgttgaaggaattcctgtttctagtagggacagaaacggaacccaggctgttctggccaatcatgccctatctcagaatgttacatttccagaacattctacagttattccagaaaactacaatcaagaaagggaaggggactgggttgattcaagacaaaatgaaaactattctgcaaataccatagtgaaatcacagctcagtaatctttttgtgactggcttatttcatttagcgtaatgtcctctagtttcatccatgttatagcatgtgtgagaatttccctttttaaagctaaataatatgctattgtatgtatatatcacatttggattaccagttcactcctttgtgaacatttgagttgctctacctgttggctactatgaataattcggttctgaatgtgggtatacaaatatctcctcaagttaatgtcttcaattacttgggtatatgtccaaaagtggaattgctggattatatagtatttccattattaattcttcgaggaattgccatctggtttcccacagcaggtgggccatttacatcaccacgacagtgtccacaggagttccagttccctaagttctcaccatgactggtcattttctgttggaaaaaaaaatcctaataggtgtgaggtgggttttgtttttatttttctaaggattaataatattaagcatcttttcctatgctagttatctaattatctctaaagaatattctccagagaaatgtcgattcatatacttttctcgtttttaatcaggtattttattttaatgttgacatgtaggacttatttttatgtactagatattattaaccccttatcagatatacgatttacaaatattttcttctattccacatgttgcattttcactgtgttggttatgtcttttgatgcccattttacatttttatgtagtccaatttatcttcttttctacttttgcctgtattatggtattaaaggtgttagtattcaaatgtctataaatactgacttactatgctgagaaggtcactctagaccatctctctgatggtggagctaagaattttacactctctcattttgtaccagggcacagtgcagctaggtgagaacacagtggctttctcgagcttatttgtcttgcatttttggcgacaaggattgttgttcacattggcctcctctggcaggtccacctggaaagcattatatttagcaagaaaaaaggaggctgtgaatgatgtcaactgtgtatattccctgttgcaagtgtcaaatccatgaagcataaaaggatttactagaggatattaaattccttgcaaagtgttgaaaaacctgaaggaataggctccaggcaaagcctctagaacaattccaagaatggcactgctggcgcaggctggggaggagctcctgctgcctgagactccacattcaagctgtctcctgcaggaaagagagcagctcttctcactactgccccctgaaggacagcagctctgctatcaactactagagacctgacccctttccctgcagccctgcctgtgttgattatatcttcatgtcagactcatgtagattcatctgttttcaagggtacaggggttatttctgcccaagtccacactgtggctttctatcataaatacacgtttctacacttgaatttccaggaattactagtatcaacagcaaaatgctacaacccaacataaagatttcctttacaaagaacatcatgctccccatgtagcattgtgctccccaaaatgtggggaaactccaatctgttcatcccaacaccatctaggaaaaaatgttcttctctcatgagccattaatctgtctacttattgtttaatttttggcctaaattgtaaaggtggctaaaaatagcactttgaatttttttaaagaaagggtatatagaaaatattaaattatttaaaatacatatatgcatgacacatttagttattgtcaccagcttctttcacatttattttattctgtagtttctggcaatactttctctatggtagagtctggaaatgctactcctcatgtccttggcttcctaagtcccagatgtggtgaagaatgcacatcagctgtgttactacagaatgcttttggattgagatgggggaggggacgtgcttgatctcactcaaatgtgctcaatttcctggtctgggtcacagccaggcagcccagtcctatgggcacaatatcttcactcgccaggtttctatcaaaatgagagtgtccttcttgactgtggaaaacacggggcagggagaggatcaagaaatagcaaaaggagtatttggacttgcctgagctgccactctggtttccccaaatgttttcattccatttcattcatgataataaacacctttctgcctaaccagccataatcacttttcttagatccagctgattcagtgataaaactaaagggaaaaaataaatacagttttcaacgtttaagctgaccaggtggctgtctctggtgtttatacctccatatcccactatgcatttcatcttccctttgcctcactggagatccaagtgcagggaatgcttcacgtgactgtgatccctagaacttcatcttcatgactgttgaaatcttctctgagttttaccagtggaaatggcaataaatagaaagattccagaaggtcccctagggtccatattttctgtacttcttctctaaaataagtaaaatcaattccatttgctcttgctttatattggctacatctatgtgcccaggacacaccctaaagccctgtgttgacaacttatccagtattgtattaagtctaaatggtcacatgcttatcatatcatttcttccaatttcatggaataattgtcatgtcaactctttggattaagaaccatcaaccagataaccacagccctgaataaatagaaacagaatatttcaagctgttcagttggcataacagtgatgagtctatagctcattttcaagatataaatattctatttatgggagtaaaagcacgaatcatggttagtgtttcagagcctccaccacatctgacagcatagcaattcaacagcacaaggtttgtgtgccagctgtgcctgactaataatgtttttttcccctgtctatagggaaatctgcacctgtgcacatgacaagagcatgagctacacttttttcactttttctgaggtaaatacattgcttgatccaaaaccgtattatggaataatttcctgactctgatgaaagcatttggaaaatcctcaaataatatttgtgcagaaatacaaccaaaaagaaaggcaaattcatatataggaaaataaccagtgctctcctcatgttacatgaggtccactagtatcacctgaccccagctgttcatctgatccctgatgtgttgtacaatgttaggggttcaggaggggtcattcttcttggcaaatgaggtgttcagaagagccagtagccctttaagtctcagttagttgaaattcataattgagtccccaaagggacctccataacattggttcatgagactccctggtaaagctgggaaaggtgactgactgaagtccatgtgttgaatcatcctcattattaaaagcccctgctcattaatagcattttgattaatattcactgggaaagcattttttttttattttggctcatctttgaaaagtctagtcatagcttttcaatcactttgtctgcaatcgttttgttgcatttctttgaaggcctgatgatctgtcaaaaccaacagccaatattattacattgccgttatgttgggaaaagctgaatgttgggagaagctgaggcagggcttgcatgtctgacgtaatgtaaaagagtcttggaacacgtccggggtccagggtctaaaaccccttgtggcctttagtacaccaagctctgtgctaaagggtggaaggctaccctgacgcaccataatctaagcccagggcataaaatcccttgtgacttggatagaatccaggactcgtggctctggagtgtgtctacacttgctggctcctttctctttgctctccaaggatcgattgtatcttgagttaaaagaacctgctctccattatctcaagtagtagagcaaatgctaaaccatcacaggtgtaaatcatgtgcttaatgcaatgcatccttttggcctccacattcttaccacgtgtttctttgttggattaccaataaatagcatgggatcccagggctcagggccttcttagcctccatacactacgatggtccctggtgcccacatttctctctcaaactgtctttttctcaatctttgactccaccagactttgtcacccccacgacctggtgttgggtctgatcaccccaaaactgttatcgttgcaatgtgatcatcagatataacccttgcagtttactcattgttatgatttttacatttgcagggcttccttgacaatggcactaatgtgacgccatccagcatccattattgtgagaactctatttggaatatcaccattgtgggcatgaacagaatggagactttcataggatgcaatgtttaatattcaacattagtcaaaatttgttctagtcctacccttggagctccattgagttggaaaaatataaataaatttattttaaatataatataaatgtaaatataaacaaatttaaatataatataaatataatataaatatacataaatttaaacataatataaatataaatataaataaataaataaacaaaaaaattttctgtagcaagagtaagaactacatgtggtccagaataccattattttatggaaggttacaaaaaattttaaatgtatttaattcagataagaattttataaatatgcatatattgcatatatgatagaataaatgtacttaaatatgaatactatatatatttgtagccaacattttatcaaaaacatatatattcacttctatgtatcttatatacatgtatgcatacttttccgtaagataaattttaattttttattgaaatactaattagttttaattttgtctttaattttcttttaataacttcataatttgattactggatattcacatttaaatcaccaatttaagaaaaaatacatgtgtgtacatataggtagaggtgtaaatactgtatcaggaagcttttatgcattactgattggtaactggttaaatacacaactcagtgactgataacagtaaacatttgttttcatgttcacggatgctcatgttcacaatcctctgactgatcaaggaagggctcagctgagtggatcctctgaaggacacagacctcatcttcagcctatagatatcaattgtctgaggactaagctgaacaccagtgactacacatgatacaagattcttgtggcaggtcacaggagtgaacatcccaaaccaaactggacagttgaatttaagtccaataatttctaacatagcttcagatatttaaaatatattcctttatttcagtgagtacaaattttcaagaaaatgtttactccatttaattatagaggtgtttgatcattccatggacaaataattatgttttcatcctttacaatcttgaaaatatttgcaaatgtaaatttgcattaataagaaaataaagctggatgtgttttcaacatgtggctttaaatataattttttaaaatggcctcattgggggaaaatcattttaacttatatgaatatccttttttgcctctcttgtgttctatagagtggcccaataagaggtcctcccatgagatttggaatcaggaaaggatggctcaatattctccattggtacctaggacagacacagggacagagatgaggactggagaaacacctggaaagatgctgtaggaagctgagagcatcagcacccccacccctaagcttccagacaggactgaggaccacatggttagatagcccatacttcaggggaagatgcattcagttttctgagggagcaacagagattcctgcttctaatatcaactttcctgactactatatccttggctttgaaaggttgtagtgggaaagttaatcgtaggaattgggtcattcttgtcatacccaacagagccaagaaaccaggagggaaagacactcagggtgcaaaatattgtctgaagaatgtaattgaaataggccctattatcccatggaactaatgtttatggttttttgaaggaacatagaaattgactcctccagtcttaaaaactcaagatagttatatttttcttatctgaggagttcttttgtcaggaaaccaaccatcaggcctccagatactatcaaaaggagctgaaacttacatatcactgaatcgggacagtgagacatcagactcttcacccattgtgattgcctaactgacctcctgcttcctgttgaccaaatcatcttccttacccctccctaattcctgttttcccacatttcttccctgatatatatacccctcattttagtagttcagggagatacatttgagaatggtgtcccatctcctcggctgcagcacctgattaaagcctgttccttggcaatacttgtcttagtgattgtttttctgtgtggtgagcagcaggatctacactgaatccctggcatttcagtaacaaaattctctgcaagcttcactgcctttggcttattgtaacctgaaatcaaatttatccacaacttctgatataacttgatataactgtaggattcactttgtccaccactgcttcccagtctgagcttgccagctcccaacccttcctagtgcccatgaactttctcaaagagccataggtaacatgttccctttttcgtaaaactctaaccttctctttgttcttccaacatattgaagaccactgagttttcctgtatgccccatttggcaaatatttctttgcacgtaaaacattaaatttagagattcatctctacattttatttagacttcagtagtttagactctaattgtctgtattaagacaattcctgctttgaatatctatagtggcctcttctctgttatataaagtccagctgaagccataaactagactcttcaggtgtcatgatctctgtctttattaaatcaggagaggcattgctagatctgtgcagttggggctgagaaagagaaaagaattagggtgcagaggtgactccatgtccccctctaccaacaccatcagagtgtggctgcatctgaggaccactctcagctgatagaggcatcaggaggagcagctggggcagccctgcctcacacatctgcttccctgggggtttatgttcgggtgtgtaacactgtgggagaataactattatactgttggcagtaataagttgcaaaatcatcaggctgcaggctgctgatggtgagagtgaattctgtcccagatccactgccgctgaaccttgatgggaccccactttctaaactagacgccttatagatcaggagcttaggggctttccctggtttctgctgataccaggccaaccagctactaatactctgactggcccggcaagtgatggtgactctgtctcctacagatgcagacagggtggaaggagactgggtcatctggatgtcacatttggcacctgagattggaaatagaaacacaaatattcatactattgatcatattataggaagacttccctgaataaccaggcagtactgagcacactgggctgagtaaattcctagtgttctccttccttacctgggagccagagcagcaggagccccaggagctgagcggggaccctcatgtccatgctgtgtcctgactgggtctgactcctgcacaaagtgtgaccagcctattaataaggcttcagggcaggaggttgtgctctgggaacatgcaaatgagcaggggatggggcaggctgggcacagctgcagagctggctcatctcagtaactcagcaccagctcagtgtccccaggtgtcccaggtaagaccagggtagcacaaatttgtctgcagagaatgtgtttctactggggactattttattatgagaaacaatttttaggtatttttttgagaattttaaatattcctcaggagccgatagagtaatgtatttcattggtgtatcaggattatttaggagaatattcttgtttgtaggaaacacatagtaaaatgttagatggtaggattctcaagtcttcaaaagactctcataagattccgggtagggaagggggtaattgtgctatacctgcaacatttctgtgagtttaacattgttcctttctaaaaaaaattaaaaataaaatgtatcggcatgatgctatatatttgtaagtattaggtaatggtgttatgcctttgttcttactagtattagatcaagcaatttattacagatatacaaagatgataccgtgttgtctccatgcatgcagcactcacagatccaccactatcaagaactgcaggtctctttaatacccagagactaaatgaggtgcaccttattcttgttttgggtaccttcatagtctaccttcttttctgccattgggtattatttcccaaagttcatctgtcttagtgagggtggccactgcacggagcatgtccctgccatgcaccatcaatgacactttcttcttatactttttatcagtgcatggggacatcatcctgacccagacaccagcctccctgttaacacctttaggaaaaacatactcaatctcttatcaagcaattgtctatgtacatggagaaatcagttggatccagatgaaactggacatggatttgcattcattatatctcatatctctaatgtaccctgaacgtcccagcctgactcagtagcaggggaagtggatgtaaccacatcagcatcagtgggctgcagcctcgggctccacaaaattttactgatgcctgactaggggagcaaaatcacagtgctgcagcccatgcacaaacatttctgctgctttgtaagcagcctgaattttaagggaacttgcttatattggaagaaaggaagaaagttccatttgtcctctaaatgtttgctgaaaatgaaccgacaaaagaataatgaataagagaaaaggcaaacaaaattcacttagagtgcggtgggatatcatagtggggtgattacccagataactcaatgagatccagttgttcatatttcctttctagggaagagggaattgggaagtgtaggcaacctggagagaatagatgaaaaaagaaatgcatcctcaaaagaacaggcaatagcctgcctggataaagcatcaacttgcagtctcttctatttttgattcatgttttgtgttaatcttccctgatataaaatttcccaggaagaatttccttgacaattgtttttcttctggagaatttgcttttaggcagataagggatatttaggaaaagacttcttgtgcatttgctgctttctaaatgcctttggctttacataatcatcataccaatgcagcatagtttgagatgttattttctggattcctttacttgcagccacctgccaagatcctgtttcagagagatgcagctgcagattgagtgagcagttgacccctgaacaacatggaggttggggcactgaccacaggtgcagatgaaaacctgtgtagaagttttgcatttctaacttaagtactaatagcttacttttgactggaagccttagtgataaaataaatagttgattacacttttttacattttatatatattttatactctattcttccaataaagtatggtaaagaaaaaaatgttcttaagaaaaccataaaaatgagaaaatatatttactactgattaagtacttgctttcaggtgacacagaagaaaatataagtgtatctgcaaacttcaaacccaagttattcaagggttaactgtaccatgatgaatgtagcagtccccatctgtagtctagggctttctcctttgctgtacctctgctcacttccaatggccatatatatgtcttatgttctttatgatcttgggcagagaggtctgcctacatgcattgctggccagatgtcctggaatgtgtatctctgaggaaagtgctatggtttgactgtgtcctccaaaatccatctgttgtaaagttcattctcagtgaaatggtttttgccaggtgggccctattgggatgtgtttaggtcatgagggtggagccctctagtggaatacattaatgccagtataaacagggtttatagggctggaatctttctctctcttctgctggtctgtcctgataagacatggccttccttccattgaaggactcaatgccccaggcatcgtcttgaaagcagagaaagctgaccttaacctgcccatgccttgatctcaaactttccgtactccagaagtgtgagaaaatatatttctgttttttatgaattacacagcgacaaggaacctgttatagcagcttgaaagagaacaggagagacagctcacaatcagtgaggataagatgaggtatatacatatcccagctttctcatctctcaggtggaatagcccagaggaatttagtccatgtttccacatgtggttgatcttcagttatcctgagtcaggtgggtggttgatgtgtcttttaccattcatcttctgctcctgcctcactttcttcctttcctcccagtgtaaatttgctgcctaaacaggaatactcattgctggtggacccaaaataagacagaaaaaaaaaatcattgtacttttgtatgagggatatttctcatctgaattcttatcacttctctttctttgacatctaggaatattcagaaaacacttttttttaaccaatctattttagattgaatttattgattttttttcctgtgtgttttgtgaaccaaaaattaagttgtaagccaccaacgagctaaatggactccccttttggcagagagaacttcaaagaaatctgaaaaactaggttaggccatgactggcaggtgggtttggatgtgtctcattatgctctcttccctttggagttcaggcacaactgaccagcattatcattataacagagatctttggactgaggaaacagatgcttgtagcaataagataccatactccaacatgacagataataggccctgaagaaaatctaaaaattttactctaaaaatatttctttttctttttcttttttttgtttttttttgagatggagtcgcgctctgtgcccaggctggagagcagtggcgcaatcttggctcactgcaagctccgcctcctgagttcatgccattctcctgcctcagccttccaagcagctggaactacaggtgcccaccaccatgcccgactaattttttttgtatttttagtagagatggggtttcaccctgttagccaggatggtctcgatctcctgacctcgtgatctacccacctcggcctcccaaagtgctgagattacaggagtgagccaccgcacccaacctatttctctgaaatattctgaagtggccctgcaaagctgcgcgttgtgggagaaatttgcattctgtagagaatctcctatgcttactaatcattttccaaaggtctgactttttttttttaaggtctgacaagcaacgtctactttttctgctacccataggattcatctacacgaaaagaaccttggcttatctaaactcaagcacaccccgttatctaaactcaagcatttctttatggtgaattcaactctttaggcagagcttaactctttcaaccagttgccaatcaggaaaactttgaagccacctgtgacctggaagcccctgcttcaagatatcccacctttccagtacaaactaatgtatatcttatatgtattgatttatgtctttgcctgtaatttctgtgtctccctaaaatgtataaaaccaacgtgtaatccaaccaccttgggcacatgtttacaggaccccctaaggctgtgtcacaggccataatccttatctttggcaaaataaatctataacttgattgagacctgtctcagatactgttttgcttacactgggtcacaaaatttaaaaatcctctaaaactatctacacatccataaatctacattagaggcagtggagtgagcacactccaacagtcaaaactcacaagttagaggaacctgagtctaagattttgtccagctctcttgcttcataaaaataatttgtgatttttttaaattttactctagagaaggacaattttggggaatatgtttatggtcagtggaatgaataatgtccccaccccaaaagatgtccatatcctcgtctctggaacccatgttatacgagttattaagaaactattttaggcatatagagaggaaacagggtccttgggaaggttttgtttcttttaaagcagctccagaaatgtttcttgtttagcaggaaagccctggctcttagagctggtccggcaagcttttttttcttttttagagagggagtctcgctctgtagcccaggctggagtgcagtggcacgatctcggctcactgcaagctccgccctctggtttcctcatgcctcagcctcccaagtagctgggactacaggcgcccgccaccacggccggctaattttttgtatttttcagtagagacggggtttcactgtgttagccaggatggtctcgatctcctcacctcctgatctgcccgcctcggcctcccaaagtgctgggattacaggcggcaagctttgatatacaaatactggccattagaaactgggtccagccaaacatggagattcccacattcttcttctttttttttttttttttttgagatggagtctcgctctgtcgcccaggctggagtgcagtggaacgatctcggctgactgcaacctctgcctcctgggttcaagcgattcttctgcctcagtctcctgagtagctgggattacaggcacatgccaccacgcccagctactttttgtgtttttagtagagacggggtttcaccatattggccaggatggtctccatctcttgacctcatgatccaccttccttggcctcccaaagtgctgagattacaggtgtgagccacggcgtccagctcccacggtcttcttccttgccccgacatttgcctgacaacatggctgcccccacatatccccatgtgtgtagaactttatggcaccctgcatttgcatattaaaacactagggtgggagggccagttttttctcaagctacatgaatgacatgcttggtaaaaccaatcccctaagccctatgcaaatcagacaccacctccttcagcctcctcatataagcagccacttttccaccgcacatggagttttctcttagttctaatctcccctctctctgtctctgtacggtggagctgttttcttcttccttccttcttgcgtattaaacttttcgctccttaaaacaaccccacgcatgtccgtttctttttaaacaaacccgcgtgagactaagaacggtggtggtcctccagtcatcagagccctatcataaggattctaccttacatagcaaaagaagaacttgacaggtgtaagttaacgactttgagaataagcaacctggttatccagatgaaaccaatataatcacaaaggtcattaaaatagaggaggaggcttgcagagaggagctgggacaatatggaaggatgtggtttgaggagggaaggggccatagagccagaaatgtgggagcacctggaagataaaagcagaggattcagttctttcctctggagcctccagaaggaatgcagccctactgacaccttaacattagctcagtgagaatgctgacctccagaactacagggtaatacatttatgttgtgtgaagccaataagactgtggcgatttaaacagcagcattggaaactaatgcaaggggaagaaatgtctttcagctcactgagcgcgtgcttgtcttctgttcttggaaatatttccaccttgttttctggtgtcagttatgacaagagacagagaaaatttttccgagagaagagctaccacgagaattcgtttttagctagaaaatctcctgggtaaaatctcatgattatctgttatacgatctgggtatcacagagtttggggtcagatctcacaacatgtgataggaggaagagggttttgttagtttgttttcatattgcgagggaaaattagattttcaggacacaatctgagaaggacagacagagtcagagatattgtaagagaaagaggagatgtggaaggagtcagggcaatgaaacacgtgtcccagctcccaaatctaaaataaagtcattgattttacaaggtgaagaaaagctcttcaccttccatcttcttaggaaggatcaaattcttcccagagtccctgcccctccttcacccccctgacattgcattgtggagctaatcacatgtgcccttaatccctgctcctgtcccaggctgggagaggctcactgtcctcaccatgcccagcaggctagagctggtgccctaagcaccaaaggagaagaggatgatttctgtgcaggcaataagagctttaccgcattttacatttccctaaaattctaagcaaagttctgtggagagaagagaacatggggcaactttatctggtggggctggaagagaccaggctctgagaatgacaattaattcacatttctacttttccagatgccaaatgctagctttatcaattgtggaaatgtggactttgagtttaagaacaggtttcaggtactgcaataattgaggagacatttggaatagagtccttagtctagggctaaagtcagactggcagtgcctgagagcttccaggcgctggccctgggctgtgagggaagcagcagttctcctgagccacagggctgaggacctgggagcaaccacaggccttggccacagggctgcctggcaggggcttgagggaaggaaactgctcacaaattcacaggagctgcattaagcatatatcccgcagcctggcaagagtgaaagtctcagagacccagaccttagggctggggctgggattctgggctggctgctgtcggctctgccctcccttgtcctgaatgactggcaccctgctggagccaaaaatggagggtcggccaatgtcctcaaagtctttactcagccagaccctgttctgcttggaaagaaaatgaacacatggtatacaaataaacataaaatcatgtgtatctgtaataagaatttctaatataaattttacatattgaatacatatattttagaaataagttgtacttatacatttgcctatactatgtgtctatttatggataaatatgtggtacatgtttatatataaagatatataactttggttgctagtataaggtatagttttaaactttaataaagtaaacacgaacattgaaaatgagcactgggtgcaccacttcatggccctcctcactccagggcctaagggtgataaagctcaggaccctcttccatgtcccccggcatggacagcagtgaactacccattgctgaggatcatgagtgacctgagggggatctgcagaatcacagagcagcagatgcccagaagattgatagtttggaccctgaatggagggacattttgatcacagggctcagcatagacaagtactcttctggtcatttctgtcaaacaaaacagcacatgtagctcagaggctgcatgatcacaggatgaagcacctccatgagtcattgccagcttcccctctgactggggtgatgtgggatctctctgccccactttcatggctcaccagctgctgggactctgttgacagtggtctacatctgtcccacgcacaaacttctcaatagttgtcattttacttactggtctccaataaccacaaattgccagccatgacccttccacaaaaattgatggagtggggttggaactatgggttcagcaatgtgccagggcatgtatataagagaaacaaggtgtggccagcccatgtctgaagtgaggatgaattttcaccatgaattcggagtaggaggtggaagaaaacatcctgacatgctccaggcagtgatgcccacaagatacactagaagcgcccacagaggaggtgggaagggggtgtgagaaaaagagggagtgtgaatttacaggtgtctccagactgttcacctgaaaagagatcagacccttaacaacacctgggaccccaggcagagctgttgctatggaagatttgtgcaggacagggataggaggagggagcacctacctgtgatggcatcttggttgctgttggccagaatgacatcttttcaggcctactgtccctgacccaggcagggatcatgtccaggagggcagcaggagctcagagccaggccctggttctgctagtgccaggctaggatgttcttcatactctggccagctctacaggtgacagtgaccctctcccctgagacacaaggaggaggacaacgatggcatccacataacatgctcactgtcatccaagtgggggaacaaacatgcagatccccaaatattaataccgagtttgtagttcctccaacttggtgcaattctgatcagaaggaaaaacaggctaacaacttcatcagcagggaaagttcatgtttaatacaaactatctgaggctgaagcctgagtttcccttcctcaccaggcagtcaggacagcaggagcaaaaggagaaaagctgggtcccaaagtccacaaggtgcctcctgagactgatcctgcttagagaaggtggtgacagtggatgagtcttctgggactcccacaccaacataccctgagctggatggcttgagccatagacatttattgctaatttattaaacgtttattgtgaatgtattagaaccctggaaagttcaagatcaaagtccagaaggatttgctttctggtgagaaccctgcttcttgttttcagatgtcacccctggatacatcctcacgtgtgttcagcaatgtgccgggcatgtgtaagtaggagaagcaagtacatgctttcttcagtgcatgcttggaggctggtgaggggttaaggaacagatcgatgatgtttatttttactaggacacaaatcctattaaatcagagccccaaggttttcacttcatttcaccctaattaccccttcataacctctatgtctaaatacagtaattttgcaggttggagattcaaaatatgaatttgtgaaacacaattcagttcatagcaggtgtgctttgaggacatgcccaaggcagtaggaagggcaaggcgaggcttccagtctcagagcacagaaggcgttttcccaccactcagcacactggcagctcctcttaggtgatccaggtcacacatgagacgccattcccgccttgggggctgcctgctgataatggaacaatatcacccttaattttcactatttctaagatcagacttctattttatgtttattatggagtttgtccaatggccaggtttgtaacataacctccaatgtttggtttgtgacataacatcttatagaattttagatgctggtttccagtgagacttgatggagttttttcatgggttttcatggagttgatcttattacatccaccattatgctgcattctgtagggaacacaaaatgattcctctcctcaataaaccagtcacctagttgaagataaagggtgttcagaaaagatggtcacaaaacaattaggggctagattctgtgatccatgtgagatgccaatgatgtgattctggaaagcagaaggtgaggttgtgagataccctgcagcacataatgcccaaggctagggtggcgagtagagggcccctggtctggatctgtctacccagcttcattcctcccattcgtgaaacagtggctgcaccagccaggaagcatctgagaccacctgattctctggaataatagctgctgaggtttgtgctgtgagctataacactgtgagtctctaactgtaaccatttagattagcactaatgaaaataatttttaagatggtgaaaatgtctatatctatgctttgcaagtgtagccgttatatgtcatatgtgactcctgaacacttgaaatgtagtgaaaacaactaaggaactatattgttaattttaattaattccaatatacatgtttgtggctgggtactgctaatgttggccatgtgagtcagggaagttttagatggtaataaacagcaatgtcatcaggacaaccaatctgctaaatgttaagcaaagatgatcccaggaccattgcaccaagctggagtggacaaggtggaaagagcacgtaggtggatctttggaacccagattctgcttcctccaggtgaatgatgtaaactctctgtcttgaagacactgacattgaagctagcgactggggagctgagtgtttctcctggaagctgcagtggaaacagaacatagatcttccttagtattactcatgtccctctccataggcttcccagcagagaggtgctgtctgatcaagtgggaggtgaatgctgtgctccctaatcaatagtctttctcagtcccatgggacatatgaaccctgtcacatgcagcccacgcagttgaagccagagccccatgtccagtgtccagtgttgcctctgccttcggtgatcccaccctacaggacccagtgatgaaggcttgagtggcagggaagagctttggggagcctgccaactagcaataagggtgcagacttgggcttccagcttctgagcaagggaacattgtatgtcctaggtgtgatccaggtcaaggtgtttgataaaagatattacaataaattattttcttaagaaaataaaaacacagaaggcatctgattattataggactgtttgggttttataccactaaagtggtaaaaataaatttttcaatgcgcagtggtttatcaggaatctcccagcccctgcccttcccgtgatgattctgtagtctttgcaggttgtatggtcacttggtggcctccttaccgatcagatgcatctacagcacaaccctaagatcttccccgattaacatagatgagcaacttcaacctccagataccacataccattggctgatttttatgcaatttatcaacactgaaagtattctattccatttcattatgtagttattattctgtgcatggctcattcccctactgagtatcagtatttgcgatcaaaaattgttttatttacttacatgcactaaaccttaaatgatagcatttattagttctgaaaactctgacattaagttaaaatcccttaaaagcaactatatgcttctttttttaattagaataaatatggtgcaatcacctcaactaaggatactaaactacttttacagttgaaaatgattaattggacatggggaaacatattgacaaaagtaacaagcattattatgatgttgaataaacacagtttgcatgtaaagtgtacagttatgattaattgtattaaaacacaggaggaagaaaggtggggattgctggattggttggtgattcagtccttagaagcaagggggagctgatgagtgatctcaggcaggcatccaatataaggtccaaatatgattaattacaatgttcttttccttaaggtttgatattttaagctggtcctgctggggaagttttgagcacattcatggaatatgtggaataaagattaaaaacagtatatttcaaaatactcttaaaaagctcagaaacacccaaagaaaactattttataaaatatcatgccttcctcgcccattcttgatatttgtgtttaaccaagcatgactcacaattcaacttttctccacattgttgcctagagtgttgaagaaattcctctaataggacagaaatggagtcaatcttgcaatatctggccaatcgtgttctggccagtcttgctttatctcagaatgttacatttccagaaacttctacagttattcctgaaaactacaagcaagaaagggaaggagactgggatcattcaaggcaaaatggaacctgttctgcaaatactgtagtgaaatcataactcagtaatcgttttgtgactggcttatttcacttagtgtaatgtcctctagtttcatccaagttgtagcatgtgtcagaatttccctttttaaagctaattttgcctttttaaagctacaatatgctactgtatgtatataccacatttggattaccagttccctcctttgtgaacatttgagttgcttctaccttttggctattgtgaataattcggttctgaatgtggatatacaaatatatcctcaagttaatgtcttcagttacttgggtatatgtccaaaagtggaattgctgaattatatagtatttctatttttaattcttcgaggaattgccatctggtttcccacagcaggtgggccatttacatcaccacgacagtgtccacaggagttccagttccctaagttctcaccaagactggtcattttctgttggaaaaaaaatcctaataggtgtgaggtgggttttgtttttatttttctaaggattaataatgttgaccatgttttcctatgctagttttctaattatctctatagaatcttctttagagaaatgtcgattcatgtactttcctcatttttaatcaggtattttattttaaggttcacatataagacttatttttgtatagtagatattattaaccccttatcaaatataagatttacaaatgttttcttctattccacatgttgcattttcactgtgttgattatgtcttttgatgcccattttacatttttatgaagtccaatttatcttcttttctacttttgcctgtattttggtattaaagttgttagtatttaaatgtctataaatactgacttactatgctgagaaggtcacactgcaccatctctctgatggtggagctaagagttttacactctcccattttgtaccgggggacagtgcagctatgtgagaacccagtggctttacccagcttatttgtcttgcatttttggtgacatggattgttattcacattggcttcctctggcaggtccacctggaaagcattatatttagcaagaaaaaaggaggcagtgaatgatgtcactgtggactgtgtatattccctgttgcaaatgtcaaattcgtgaagcataaagggatttactagaggatattaaattccttgcaaattgttgaaaagccttaaggaacaggctccaggcaaagcctctagaacaattccaagaatggcactgctggcacaggctggggaggagctcctcctgcctgagactccacaacattcaagctgtctcctgcagaaaagagagcagctcttctcactactgcccccagaaggacagccgctctgctatcaactacgagagatctgacccctttctctgactgcccatcagatgtgttactacagagtgcttttggattgagatgagggagggaaaatgcctgatctcactcaaatgtgctcattttcctggtctgggtctcagccaggcagcacagtcctgtgggcacagtatcttcacttgccaggttcctataaaatgagagtatctttcttgactgtggaaaatatggggatggtaagggtcaaggaataggaaaaggagtacttggagttgcctgagctgccactctggtttccccaaatgttttcaatccattaaattcatgataataaacacctttctgcctaaccagccataatcgcttttcttagatccaaatgattctgtgataaaactaaagagaaaaaataaatacacttttcaacgtttaagctgaccaggaggctgtctctggtgtttacatgtccatatcccactatgcatttcgtcttccctttgcctcactggagatccaagtgcagggaatgcttcatatgactgtgatccctagaacttcatcctcatgactgttgaaatcttctctgagttttaccagtggaaatggcaataaatagaaagattccagaaggtcccctagggtccatattttctgtacttcctctctaaaatatgtaaaatcaattatatttgctcttgctttatatgggctacatctgtgtccccagcacacaccctaacgccctgcgttgacaacttatccagtattgtattaagtctaaataggcacatgtttatcatattatttcttccaatttaatgagataattgtcatgtcaaatctttggattaagaaccatcagccagaaaaccacagccctgagaaaatagaaatagagtatttcaagctgttcagtttgcacaacaatgatgattctatagctcatttacaagatataaatattctgtttatgggagtaagagcaacattcacggtgagtgttgtagaccctccgccacatctgacagcatagcaattcaatagcacaagggtttgtgtgccagcagtgcttgactaataatgggttttttttctatagggaaagctgcacctgtgcacatgacaggatcatgagctacactttacttcactttttttgaagtcaattaccttcttgatccaaagccacagtatggaagaacttcctgactctgatgaaggcatttggaaaatcctcaaataatattttatgcagtaacataaccaaagacaaaggaaaattcatatataggataataaccactgctctcctcatgttacatgaagtgcacttgaatcacctgacatcagctgttagtatgagccctgatgtgtggtagaatgttaggggctcaggaagggtcaattttcttggcaaattagtgttcaagagagccagtagccctgtacatctcagttagttgaaactcatattattgagtccccacagggacctccgtaacagtggttcatgaggttacctgggaaagtgggcaaaggtgactgactgaagtccatgtgttcaatcatcctcattatgaaaagccccctgctcattaatggcatttggattaatattcactgagaaagcatgtttttcgattatggctcatttttgaaacatctagtcatagctcttccaaaatgactttgtctgcaatcatcctgttgtgtttcttttaaggcctgatgatctgtcaaaaccaacaaccaatattattaaattgctgttctctttgcaatgtggcaatgtgatcatcagatgtaggccttgcagtttacccacggttaggatttttacatttccagggattccttgacaatggcactaatgtgacgccatctagcatccattgttgtgagaactctatttggaatatcatcattgtgggcatgaacataatggagactttcataggatgcaatgattaatattcaacattagtcaaaatctgctgtagtcctacccttggagatctactggtttggaaaaatattttaggtaaggacaacaatttggtaaagttttaaaaataaaggctaaaaagaaattttctttagcaagagtatgaactatctgtggtccagaataccatttttttacagatgcaagaaaaaattatttaaatgtatataatttagataataattttgtaaatttgtatatattgcatatataatagaataaacataattaaatatgaatactatatatacttatagccaacattttatcaaataaatatatattaacttctatgtatcttatatatatgcacatttttccataaataaggtaaattttaattttttaatgaaatactaattagttttaatttcatctttaattttctcttaataacttcataatttgattacttaatgttcacatttataccaccaatttaagaaaaaacacatgtatctatatataggcagaggtgtaaatactgtatcagtaagcttttatgcattaatgattgataatcggttaaatatacaactcagtggctgataactgtaaatatttgttttcatcttcatggatgctcatgttcacaatcatctggctgattaaggaagggctcagctgattgattcctccgcagggcactgagcttgtctttagcctacagataccaattttctgaggacgaggctgaacagcagtgactacacgtgacacaagattcttgtgacaggtcacaggagtgaacaacatcccaaaccgaactgcacagttgaatttaagtccaataatttctaacatagcttcacacattttaaatatattttttgatttcagtgagtacaaattttcaagaaaatgtttactccaattaattatagaggtgtttgatcattccatggacaagtaattatgttttcaacctttacaatcctgaaaatatttgcaaacgtaaatttgcattaataagaaaataaagctggatgtgttttcaacatgtgcttttaaatataatttttgaaatgacctcaaagggggaaaatcattttaacttatgtaactatccctttttacctctcttgtgtcctatagagttgcccaataagaggtcctcccatgagatttggaatcagaaaaggatgactcaatattctccattggtacctaaggcagacacaggaacagaggtgaggactagagaaacacctgaaaagatgctgtaggaagctgagagcatcagcacccccacccctaagcttccagacaggactgaggaccacatggttagaaagcccttacttcagggacagatgcattctgttttctgagggagcaccagagattcctgcttctaatatcagctttcctgactactatatccttggctttgaaaggtcatagtgggaaagttaatcataggaattcggtcattcttgtgatacccgacagagccaagaaaccaggagggaaaggcactcagggtgaaaaatactgtttctagaatgcaattgaaataggccctattatcccatggaactaaagtttatggttttttgaataaacagaaatcgactcctccagtcttaaaactcaagatagcaacatttatcttacctttcttttttttttttttttttttttaaatttcaggaaagcaaccatcaggcctcccagatactatcaatttgctgaaacttatatatcactgaatcgggacagtgagacatcagacccttcacccattatgattgcctaactgacctcctgcttcctgttgacccaattatctttcttaaccctccctaactcctgtttttccacatttcttccttgttatataaacccctaatttcagttggtcagagagatacatttgagaatggcatcccatctcctcagctgcagcacctgattaaagcctggggcttgaaaatacttgtcttagtgattggctttctgtgtgacgagctgcaggatctacaccgaatccctggcatttcagtaacaaaattctctgcaagcttcaccgttttggtttattgtaacctgaaatcaaatttatccaaaacttctgagataacttgatataattctaggattcactttgtccaccactgcttaccagtctgagcttgccagctcccaacccttcctagtgccaatgagctttctcaaaagagccataggtaacattttccctttttcataaaatgctaaatttctctttgttcttccaacatattgaagaccactgagttttcctgtatgccccatttggcaaatatttctttgcaaataaaacattaaatttagagattcatctctacattttatttagacttcagtagtttactctaattctctgtattaagactatatctgcttcaaatatctatagtggcttcttctctgttatacgaattccaactgaagccataaactagactcttcaggtgtcatgatctctgtctttattaaatcaagagaggcattgctagaactgtgcagttggggctgagaaagagaaaagaattagggtgcagaggtgacttcgtgtccccctctaccaacaccatcagagtgtggctgcatctgaggaacaatctcagccaatggaggcatcaggaggagcagctggggcagcccagtctcacacatctgcttccctgggggtttctgttcgggtgtgtaacactgtgggagggtaattgtaatcttgtagacagtaataagttgcaaaatcttcaggctgcaggctgctgatggtgagagtgaaatctgtgccagatccactgccgctgaaccttgatgggaccccactttgtaaactggatgcagcatagatcaggagcttaggggctttccctggtttctgctgataccagcctaaatcatttctaatgccctgacttgcccggcaagtgatggtgactctgtctcctacagatgcagacagggaggatggagactgggtcatctggatggcacatctggcacctgagattggaaacacaaaaacaaatggtccacacaattaatcatgtagtaagagaatttccctgaatagccaggctgtgctgagcaccctgggctgagtaaactgccagtgttctccatccttacctgggagccagagcagcaggagccccaggagctgagcggggaccctcatgtccatgctgtgtcctgagtgggtctgactcctgcacagggtgtgatcagcctgttaataagtcttcaggtcaggagactgtgctctgggaacatgcaaatgagcaggggaaggggcaggctgggcacagctgcagggctggctcatctcagtaactcagcaccggctcagtgtccccaggtgtcccaggtaagaccagggtagcacaaatttgtctgcagagaatgtgtttctactggggactattttgttatgagaaacattttaaagatattttttgacaatattcctcgagagtcaatggggtaatatatttcattggtgtatggggattattttggagaatattcttgtttgtaggaaacacagtacatattagatggtacgattctcaggtcttcaaaagactgttataagattccatttagggaagggggtaattgtgctatacttgaaacatttctgtgagtttaacattgttcctttctaaaaaattaaaaataaaatttattgacatgatgctatatatatttgtaagtattaggtaatggtgttatgccattgttcttaccagtataagatcaaacaatttactacagatacacacccctgatgccgtgcttcttcaatgcatgtggcactaacagccccaccattatcaagagctacaggtctttttaatacccagagactaaatgggctgcacctgtgtagaatttttgcatccctaacttaagtactaatagattgcttttgattggaagccttagcaataaaataaatagttgattaacatgttttttaatgttatatatattatatactctattattccaataaagtatgctaaagaaaaaaatgttattaaggaaaccataaaatagagaaaatatatttactacttattaagcatttgcttacaggtgacacacacagaacaaaatataagtgtatctgcaaatttcaaacccaagttattcaagggttaactgtaccatgatgaacgtagcagtccccatctgtaatctagggctttcccctttgctgtacctctactcatttccaatgaccatatatatgtcttatgttctttatgatcttgggcagagaactctgcctggatgcattgctggccagatggcctggaatgtgtatctcttaggaaagtgctatggtttgactgtgtcctccagaatccatctattgtaaagttaattctcagtgtaatggtttttgccaggtggggcctattgggatgtgtttaggtcatgaggctggagccctctagcggaatacattaatgccactataaacaggaattacagggctgagatctctctcctgctcctctgacatgttaagacatggccttccttcctttgaagaactcaacgctccaggcatcatcttgaaagcggagaaagcagaccatgtggttgatcttcagttatcctgagtcaggtaggttgttgatgtgtcttttaccattcattttctgttccctccctcactttcctcctttcctcccagtataaatttgctacctaacaggaatccttattgctggtggatccaaactgagagagtaaaaaagaaaagtcattaatcttttgtatgaggggtatttctcatctgaaatcttaccatttctctttctttgatatgtacaaatattcaggaagcacctaatttttttttttttaccaatgtatcttagattgaatttacgctgtgattttttttctgtgtgttaaaacaaaaaatcaagttgtaagccaccaacctactcaatgggcttctcttttggcagagagaacgtcaaagaaatctgaaaaactaggttaggccatgactggcaggtgggtttagatgtaactcattatactctcctccctttggagttcagacaaaactgaccagtgttatcattacaacagagatctttagactgacaaatcaaatgctttgtagcaataagataccatactccaacatgacagataataggccctgaagaaaatctaaatattgtaccctaaaaatattttttttgatgtattctgaagtggccctgcaaagctgcctgttatgggggaaatttgcattctgcagagcatctcctcctcttactatgtcttttccaaagagttggacatttctttaaaggtctgataagcaacattcaccatctactttactgttacctgcaaggttcatctaagtgacaagaaccttgacttccacacccccttatctaaactcaaggatttctttatgatgaattcaactctttaggcagagcttaactctttcaaccagttgccaatcaggaaaactttgaagccacctgtgacctggaagcccctgcttcaagatatcccacctttccaggacaaactaatgtatatcttatatgtactgacttaggtctttccctgtaatttttgtgtctccctaaaatgtataaaaccaacgtgtaatccagccaccttgggcacatatttgcagggcctcctaaagctgtgtcacaggccataagccttatctttggcaaaataaacctatacattgattgagacctgtctcagatactgttttgtttacactgggtcacaaaagttaaaaatcctctaaaactctctacacatctataaatctacattagagacagtggagtgagtatacctcaactcaagtcatactttgagtttaagaaccagacagattttcaggtacttcgataaatgaggagacatttggaatagggtccttagcccagagctaaggtcaggctggcagtgcctgagcgcttccaggccctggccctggtctgtggaggaagccactgttctcctgagccacagggctgagaacctgggatgagccacaggccttggccgcagggctgcctggcagggtcttcagggagggaaactgctcacaaattcgcgggagctgcattaagcatatatccccccagcctggcaagagtgaaagtctcaggacacagaccttagggctggggctgggatcctgggctggctgctgtcagctgtgtcctcccttgtcctgaatgactgggaccctgctggagccaaagagggagggtcagcaaatgtcctcaaggtcttcactcagccagactctgttctgcttggaaagaaaaggaacacatgctacaaaaataaacataaaattatgtgtatttgtaatatgaatttctagtataaactttacatattaaatacatacattttagaaataagttatatttatatatttgtatatactatgtatctgtggataaatatgtgatgcatgtttatgtataaagagatgcaagtttcattgctagtataaggtatagttttaaactttaataaattgaacgtgaacattgaaaacaagcactgggtgcaccacctcatggcccctcctcactccagggcctgagggtcataaagctcgggactctcttccatgtgccccctgggccgatagcagtgagctacccattgctgaggatcatgagtgacctgagggggatctgcagaatcacagggcagcagatgcccaggagatggatagtgaatttggaccctgaatggagggacgttttgtccacagggctcagcacagacaagtccttttctggtcatttctgtcaagcaaagcagcacacatggctcagaggctgcatggtcagaggaataagcccctccatggctcattcccagcttcccctctgactggggtgatgtgggatctctctgcccagctttcatgactgaccagctgctgggaccctgttaacaatggcctatgtcagtgccatgcacaagcttcttgatagttaccattttactttctggtctccaataaccacaaattgccaaccatgaccgtttcacaaagattcatggagaggggtcagaattatgggttgagcaacgtgccggggcatgtatgtaagagaaacaaggtgtggccagcccatgtggaagtgaggatgaattttcatcatgaattcagagaaggaggtgggagaaagcatctgacatgcttcaggcagtgatggccacaagatacattagagatgttcatagaagaggtggcaagtgggtttgagatgaaaagggaatgtgaattcagaggtgtcccccagcctgttcccctgagaagatttcagacccttagcaacccctgggcccccaggtagagctgttgctagggaagatttgtacatgataggggacaggaagagggatcacctacctctgaaggcatcttggttggtagtggccagagtgacatctgttcaggcccattattatccctgacccaggcagggatcatgtccaggagggcagtaggagccagcaggagctcagagccatgccccagttctgctggtgccaggctaggatgttcttcatactctggccagccctgcaggtgacagtgaccctctaacctgagagacaaggaagaggatgaagatggcatccacataacatgctcactgtcatccaagtgggggaacaagcatgcagattcccaaatattaataccaagcttttatttcatccaacttgatgaaattctgatcagaaggagaaacagtctaacaaattcatcatcaaggaaagttcatgtttaatacaaactatctgaggctgaaacctgacttccccttcctcaccaggcagtcaggacagcaggagcaaaaggagaaaagctgggtcccaaagtccacaaggtgactcctggggctgatcctgctcagagaacgtggcaacagtggataagtctgccgagaatgccacaccatcatactctgagctggagggcttcaaccacagacatttattgctaatttattagacatttattgcgaatatattagaaccatggaaggttcaagatcaaagtccagaaggatttgctttctggtgagaaccctgtttgtttccagatgtcctctctggatacatcctcatgtgtgttcagcaatgtgccaggcatgtgtaagagaagcaagtgcatgctttactcagtacacgcttggaggctggtgaggggttcagtaacagctcaatgatatttctttttattaggacacaaatcctattaaatcagaaccccgatgttttcacctcatttcaccctaattacctcttcataacctctatgtctaaatgcagtaatattggaggttggagattcaaaatatgaatttgtgaaacaccattcagttcatagcaggtgcactttgaggatatggccaaggcagtaggaagggcaaggcaaggcttccagtctcagagcacagagggcattttcccaccactcagcacactggcagctcctcccaggtgatccaggtcacacatgagaccccattcctgccttgggggctgcctgctgataatgaaacaacatcacccttaatttcactatttctaagatcaggcttctattttgtgtttattatggggtttgtccaatggccaggtttgtgacataccacccaatggcaggtttgtgacataacatcttatagaattttagatgctggtttccagtgagacttgatggagttttttcatgggttttcatggagttgatcttattacatccatcaataggctgcattctgtagggaatacaaaacgattcctctcctcaataaaccagtcacctagttgaagataaagagttgagaaaagatggtcacaaaacaatcaggtgttaaattctgtgatccatgtgagatgccaacaatgtggttctgggaaagagagagtgaggttgtgaggggccctgcagagcacaatgtccagggctagggtcgggagtagagggcccctggtctggatctgtctactcagcttcattcctcccattgttgaaacagtggctgcaccagccagcaagcatctgagaccacctgattctctggactaacagctgctgaggtttgtgctctgagctataacactgtgagggtctaactgtaaccatttagatcagcactaatgaaaataattttttaatatggtgaaaatgtctgcaaatttctaacagaaaaattgatgaaaagatggtttttcttaggcccccacagcagtctctgcctgggacctgactttgtctttgagccagtggaatctatgctgagattgtaagctgggcagggaaatcacagcagggcaggctgtgctctgggtgctgaggaggacaggaggacactccttcagggttagtgatgctgggagttcgaggggagagactgcatggagctgcctgtgaatcgccctagcaatgccctctggacactgctcatctcacaagtgtactcggatgccagtggatggcccaaacatgggctcaggttggacaaggacaaagatttagggatgaatatatggggctcatttgatactctgaagtttcagcacaagcataacgaattatatggggagagaaagaagtcacaaggttgtgatttttcatttggtattaaaatatatcccctctgctcatttttccctgcagaatgtaactactgatacatatttaagcaaagtcactgtttttaattgttttagtaactgacagcctgtgtgcacagttcctaagtaactgggtagccagaccatcattcctatggtaaagccaggaagtgactgtggatgtgaacaaatgtgagtttaatgtacatgtctccaaagccacgggccactgatctagggagaacctgcagtcagtttgctttcccatgcccagatgagaggacaccttgatctgtgttcttctgatgaactctaaaaactctaaaaactgatgaactctaaaaactaatattctgaaggtctagttcatacttcttttctttgctagagggactctctcactcacatgtattgtactctctgcatagaacagtatgtgatacatacaacttgttttctgctaaatacccatcaatcatgtcattcatgagtcttccatagatgttacctgccctatgaatctgggctcttccaaaagaatgggccagaggtggagctgtgctttcacattctcttgtgcttccctcgtggacaacctttgctagttgtcacccttcccacccagcaaaagtaactgtctttctgacatctacacaatcatttaggttttcctgtcttaaacttcatataaatagcattatgtgtatttttatctttttagtcttggtattattccttactacttttgaggccttcatttcttccagtggactcaaggtcctgtctgatgtcatttcctgtgattctgaaggattttctctcaaatgttttataagacatagctgctatgaatgaatgtattttgtttaccaaaatttttttttttgcctttttgttagatttgaaggatattttcactggatagatttcctggctgccttcttttttttccttttcagcatttaaatatgtcattttactgcttctagcctctattggtcccgatgaaaacttagccaatggctacgttgttgtgtctctgtatatagtgtctgcttttattctgatgcaatgaagattttttctttgtctttcaacattttaatatagtgtgttcacttattaatttctattgactatctaaaagggttttattgaattatttcatctaagaatattttttattacttttgaaaagtttttgtcattgtatctccaaatattttttcagccactttctctgtctctccttctttgtgactctcattatacatttgttggtatccttcactctgagctataaatctctgacatttcttcctttttttctaaacattttctttaggctcaaacatttccattcctctattttcaagttaactgattgttctgtcatctcaatttgctattagacctagctaataaatatttaaattgtattatggtacttttcatttctagagttcccatttggtcattttttatactttccatttcttttcttgaggtcctacttgctgaatcttctttttaaaaatattttcgtttttatgtcaatgatcatagttttaaaaataattatttgaacatctgcatattaactgctttgtagtctttgctaaagccaataatgaggacaagttagaatcagctttcattggctattttctgttgtcattattgtagttgctttactttgttccttcaatataaatcatactcctctgtttttttttcaggattttttaaaactgaaagctgcacacttttgataatatattatagtacctctctttagattgtggggtttttattttaattttaatttttttagaaacagggtctcactctgtcacccaggctggagtgtggtggtgtgatcatagctcgctgcagcgtcaacctcttgggctccagtgatcctccagcttcatcctcctgagtagctgggactataggtgcatgccaccactctctgctatttaaaaaaaaaaatttgtagagataagggtgtcactattttggccagcctggtcttgaactcctggcttcatgtaatccttctgcatcaggctctaaagtagtgggattacaggcttgagctaccatgtcaggcctggaactggtttcatttttctgagcattttaaaatttttttcttagttacttgtcagaacttacttctggtacctgacttatgatagttggagttatcattttttgactttcagatggtgtgaaagtgatatgcattcaagtagaaatagtacttctagtatttatacaactattctatcttctctttcaatagagtattcaataaattgcatgagatattcaacactttgttgtaagataaggtttgtgttagataatgttgccctactgtaaactaatgtaagtgtactgagcacatttaggatagaataggctgagctagtggattacatatattaaatgtattttcaatgcatgatattgaaaaatctatatctcatatggtgtttgaccactgatatctctgctttttattcttaatatttagtttgaatttatagaaactgcacatgtatctgcacagcttagtggtcaccaatgatttgagaagaagttttgctcaaatatctggaggttataaatctatcttctgtcaatccatctgtgtgtagtttaaaaagctcctgcaaaatgcagctagttcttacctccctctggttttactttgcaccgggcacttctgggtctcatcactcatatctatagcttctaagtcaccaggaatgtgtgtagagattgtttcagcaatatggctctatcttacccaggaatctgctatttactgttagcaggtgtactacttgccccaaacagggcatcatctttgactaacaaagctgtgggctttttctgttcattccctatggagttctgcatgtttagctggaaacactgaagaattttacttcattccttggctttactcaagttcacccgctttggcagcaagctgctagctttatttgctatcctcatattggtaaaactccagttctgtatttcatgctgactgagctgggggtagaagggtgctgtcacaggcaaaaggctacagactttttctgtccttactcaaagcactagtacttttttttctataaagaatatacatctttaattattttatgcttcaccaattttcagagtgctgaaatagttttgatattttagctttatatgtgtgtttgttatttatttttgcacagaagatttattaaactctttgtgatgccataaacagagatgccttctaaaatgcatttaaatgaacataatagccatgctgaaatggaatgaggttatttactaacataagtaattttggacttgagaacttgaactcttcaccctcagtttaaagagaaaccaaggacttaaaaaatagagaatcctggtccctggatttcacattcatgaagaaatgcacagtcaatttttaagatgccttctttgtattctagaactgagcaaattagtgattacactctacataatgggagctatgattgtctttaatagagataagaattagaaataggaaaaggtagctgggtgcggtggctcatgcctataatcccagcactttgggaggctgagacgggtggatcacgaggtcaggagatcgagaccatcctggctaacatggtgaaaccccgtctctactaaaaaaatacaaaaaaattagtcaggcgtggtggcgggtgcctgtagtcccagccacttgggaggctgaggcaggagaatggcgtgaacctgggaggcagaggttgcagtgagccgagatcatcataccactgcactccagcctgggtgatagagcaagattccatctgaaaaaaaaaaaaaaaagaaagaaagaaataggaaagtgcaaaataggaggaaacttgtggaattgtttaaaaactacctttttcttattttttagttacttgtgtgtgtgttttaagtttatgtggaaatacttttagacctaaaatttgaaaaatatggtaaaaatgattcccatatgcgcctctttcagcttgctctaatgtcagcatcataaataaccacagtataagtatcacaaccatgaaatgaacatagatataatgttatttgttaactcatttaaaataccatatggatttcactgatttttcctgttgatgactttttttatgttacaagataaaattcaggtttctgtattttatttggttatcctgtcctcaatatctttaaatctgtgatagtttttcacttttgtttctctttcatggccttcaaacatttgaagtttactgtccaggtatgttgaagaatgtcctcctagttgggtttgtatatggtgtttactactgattcaattcacaccattaatttttggcaagaataatacagacaggatgtatcctcagtgcttcacatcagatgttacataatgtcaacatgtcttataggtggtaataaacgaatatgatcaatgaaatcccatttggaaggaagttttggacaaaaataatgaaaacaactgcttctatcactctttctactaggtcattgcagacgtcattaggaataatctatttcttccttatcgaatatgtactttattttaacaaactttaatctttttacagtctactgcatcacagagaaaattgaagaaataatttagttaacttttaaatggcaaatgtttccataataaccatttgccactgaaatgttgatagcctgaagaaagaaaaagaatgggatttattcagccatggtagtatcttcacatgaacagcttttaccgagtcaactatttggataaataaatagaattttctactacttagaatgttgcaaaattcaaatggagcagtgtagcatgcactgagctacctctactgggaaagttaagaaccactgaggctatataaggattcatacagtgagtcactatttctggaaacctgggattctggtgcctcagttgaacagagtccaagaatcaaagtccaaattgttcaatgatttttttttagaactgcaaaatgtccaaatagagcagagacgctaaaactgagtggccaccacattagctgtctgtaaaggaagcagctggtaaaatctagtaaacactgatggtcttgttgaggtttttgtttcatgttgaatcactgtgggaggtaagttataatcctgctgacagtaataaactgcaaaatcttcaggctgcaggctgctgatggtgagagtgaagtctgtcccagacccactgccactgaacctggctgggatgctagtggccctggtggatgcaccatagatgaggagcctgggcgcctggccaggtttctgctgataccaggttaagtagctgctgctaacactctgactggccctgcaggagagggtgactctttcccctggagacaaagacagggtgggtggagactgtgtcattacaatttctctggtggtatccaagattggaaataaaacagaaatgcactcatgtaatctagatcaaaccagctgtctttgagtagagccaaaattgttgatctacattgaattttaattatatttcttgctgagcagaggtggcaggagttttcactgatgtgcaaaaccacctcatgttcccctcacctgggagccagagtagcaggaggaagagaagctgagctggggcttccatggttccgtctgggtcctaactgagcagttccttcccagggctctgacccaggcattgatatgggctctggaaggtagggcagctgggagggacatgcaaagcagctgggtgggagctgagcttccagctgcagagaccacctgcttcttcctctctgcactgagcgtcctgtgcctccctggttgtcaggccagaaaagtctgttggctcagtctgagtgtagaactcctcccttgtgctcacataatttcactcctgtgcctttcttctcttcaatcacctaaatacacccgtatgatatttggcacaagtctgttaagaacaatataaaaggctgtgttttcatttctctcttcctgtcctcagtatgcccagtcatctccctaagtgcattattggatctatggaaatgaagagtctgttagaacttaatcttccagatagacattttttttttttttttctgagacggagtctcgctctgtcttccaggctagagggcagtggtgcgatctccactcactgcaagctctgcctcccgggttcatgccattctcctgcctcagcctcccaagtgcctgggattacaagcgcctgccaccacgcccagctaattttttgtatttttagtagagacggggtttcaccatgttagccaggatggtctcgatctcctgacctggtgatccacccgccttggcctcccaaagtgctgggattacaggcatgagccaccgcgcccggcccagatacacctttcatttgcttattagtaatgttttctgagggtcctgaagctttccattaacccagacacataccctctttgagttaaaaacttctgtttacagtcacatgtcctggcagccctgacatagatgctccatggcttgccgattgcttgaaattaatcaagtaacttaacttccctgtgtctcggtttccatatctgtgtaactgtgacaatagtggtacctgccttacagtgctgtagacagtttaaagaaaataagataaaacatttacaatagtattcaggacattatgtatgtggcaattaattttgttttcattgtttaaatattcagcactacagtcatcatcattataaatatacttagcatggaaaatagtcttaaatctaatccaagaatgttttatccacagtcaaattaaattctaaggcattttcttcagtaactgtacacaactcttaaaatcctaatgatttgatcttaatctgtgctaaagtactcagaccttccatcattcccatccatccctgtctaacgcattacttctcatcatccattatttaaatgttaccctataaacggtccccatgtcctgttgctgtccttctttcttatgtaatctttattctaccttgttatcttttatgttattcttgccccaggactgacaataaggaaaagctaccatcatttcttgtagacttgctccagtataattttttcaggcttgttgtcttggaaatgaggattgtgtcttgcaaagaaacatattcattgggtcaatgtgttatgaaataaaagattttatctacttatgatccaataattaatttagactgacttgaacagatttttaatgacaaaaaggagaagacgatataagagaaaaatttaatacaatagaaaacacaagctaatataacgcttgcttcatggatttttacatgtatattagacatatgctgggtatatgtgcgcaacgacaatctaaaaactgaatgataactagcttaaggaatgcctgcattacactgagtcttgcccacttttccagttatgaaaagaaagctacagcactatttgtatgagtatcaaaccttctagatgctgtgatagaggtagagaagatttactgagaccaaagccttggaagtagtagatgcttgttctatgatattatgtggctgtggttgccgttgttaggaaatacagtgggagtgaaagcaaggagaagatttacaagctctgctcttcctcatactcacaaccccctctagagatggacagatgttggtccaggaatctctgacacctcttagaagccttttgctctttccagaatgtttcctgacaagtattgttttgagtcacagattaggtgaaactaggtgtagaagaaaggactagagcaagggaagaagttttccatcccagacagttgttgtaggaacagggaaattgaatttttcatagatttatgtgacacttgtatcatgttggggagagaggcatcaaaccaggctcattactgaaagaattattacgttatttaagagagaaagaactgtgaatttcttgtcaaatagatgtttaaaattcaaaactactattttttttttggagatagaatctcactctgtcacccaggctggagtgcagtggcacaatcttggctcgctgcaacctccctctctccatttaaagcaattctcctgcctcagactcccaagtagctgggattacaggtgtgtgccaacatacccagctaattttcatatttttagtagagacgggattttgccatgttggcccggctggtctcaaactcctgacctcaggtgatctgcctgcctcggcctcccaaagtgctggaattgtaggattgagccactgtgcctggccctactgatgtattaatattattcatcttcttgaatacaccaagtggtaaagtgcaaatccacactttaaacttgagatttctcctcctatgtgaattatactagtgaggaacaaaaaaattctctgttggtggggagatgatgtttgacagcggtcagtttgtgaagcagaggcttatgtcacaggactttttacagtattacatataaacatggtgaatggcctcaaacacagaagaatcagcttttttcatgagccatactaccaccaagaaagaactgaattgaaacctgtgactacttgatgaagggtgtataaagaagagggaaagatttgggaggccaaggcgggtggaccacgaggtcaggagatcaaaaccatcctggctaacatggtgaaaccccatctctattaaaaatacaaaaaaattagctgggcgtggtggagtcccagctactcgggaggctgaggcaggagaatggcatgaactggggagtcggaggttgcagtgagccaagattgcaccactgcactccagcctgggtgacagaacaagaatctgtctcaaaaaaaaagaagagggaaagaaaaatgacacaaaacacaatgtcataaatggaaaggaagaagtcattacacagcctacaggagtaaaaaaataaagagaggatattatgagtaattttatgtcaactaacttgacaaaagtggtgcagggcaggttcttggctacactcaggaaggaatgcagcgtaagctggtggtagaagaaaacagctttactgaggtggcagtgttacagctttgtgtctgttcttgtgaaacagagctaccacataggcattgtgccaagagcagtagcgtaggggcagttttgcagtcatatttatccccacttttaatgacatgctaataaaggagtgggttattcaggaatagctagaaaatgggcagtaactttcaggttttgccatggcaatggtaaactgatatggcactggtgggcatgtgttatggacaggtgcttccagtgtctcttccttgtgtcagccagtcttcaatctggtcctgggttgagtcccacctacctcctatctcattgctccctcagagattagatactcctccttaatcttaaggggactgcagaagagcagagtcccttttctgtaagtgcttcctgctgactttatgggggcaggccttccctagcctttgaggagtaaaaatctttggtacctgaactaaggggcccaatggcacgatgcattcatttgtggggtcagaagacagaatgggttggaagacttatgacagaccgtatcatctttacatgaaatttagaagacataaactttactaggatgttaaacaagaaaattataattggaagagagggaaaaattaatgctcctaggtccacctacggaaccatgttattaatccatgtgtttgcaaaacaacaaccttaagttttctgttttataaatggaggttgtggtgtcccccttttgtggctgtaggaccttgtaagaaacaggtttaatcctgggcagctgtacccaactagtggcttcctgaagcctaacagtaattaagagtaataaagaatatctgataatggctccttattctggttattattgattcttgggggatcattttgttgttgttgttgttgttgttgttgttttttgagatggagtctcgctctgttgcccaggctagagtgcagtggcacaatcttggctgggctcactggaacctctgcctccagttttcaagctattttcatgcctcagcctcctgagtggctgggattacaggcatgtaccaccatgcccagctaattttgtaatattagtaaagatatggttttgctatgttggcaaggctgatttcgaactcctggcctaagtgatccgcccatctcagcctcccaaagtgttgagatgaaaacgtcacaggagctgatgaaaaaggaaaaggagacagcaatgatcccaggcctttttaaagggagaacaagctgaaagcagcaaaatacaacagttaaatctctaagacactaatctcagaagttttaaaagaaactcattatcgtatcacaggcaaaattttttgttttacttgttttttttttttttttttttttttcttttttttgagatagagtctcgctttgtcacccaggctggagtgcaatagcgtgatcttggttcactgcaacctccacctcccaggtttcagccattctcctgcctcagcctcctgagttgctagggttacaggtacatgccactgtgcctggctaatttttgtatttttagtagagacaaggttttactatgtttgccaggctggtcttgaactcctgacctcaaatgatcctcccaccttgggattacaggcatgtaatcccaaagtgctgggattacaggcatgggccaccatgctcagccttaaagctgtatttttattaagtaaagtgtagaagaaaaagtgtaaataaagtgacagaaggaaaacacaaggctgttatggaaaatgataaccttagggcagaaaacaagaaaaggcaaaccaagatttccatagggtgaggctccaatccacaatcctcggatgaatgtcaatgctaaaaaccctggagcctccagggagtggccaacagtactaaatgctgaaaacccagagtacacgagtatcagcctatgaatgtcccacaccaaatgccaggaaaccctggagtatccaggggctgaccagtgcagaaaatcctggagcctcagtggggtggccaacaatgagccccaaaggcctggttggggccatagaacaatgtgactctggcttcttagagtcaacagaacaggagaattccgcggatcncacgtangtantanatgtanatgtanangatgatanangatgatanangatgngtanangatggtangancgttanaatanatgtanatgtanatggtanatgtanatggttangtnatgattagtgaanangtaanangnnntnatanangattnatananggntnanangnangatanangatanangntnccanggncanaaanagatgaangggntnaaangntcgttggtngan

SEQ ID NO: 5 - DNA, 54840 bp, synthetic construct
  misc_feature 1..54840: note = RP11-344F17
  source 1..54840: mol_type = other DNA
ttaattaagcctgtaattttaatgcagttgaatatgtcaatcgtttattgactatgttttttataaagtttaagaaattcttctctattttgggagtcatgaagatattcttgcattccagattttcctcctgacataatttactttcttcctgaagtgcaccctttagtagtctctttagtgaaggtcagtggctagtagtcagtttgatttactagaaaatgtccttaaatttcccctgacaattattttctctccacacttccaagatatatttccactgtgttgtatattttttcatatgattctgttgtattcttgcttccattgttgccgttgaaaggtcagctgtcagttgaactcttattttgtaggaatctgtcttccttacttggctatatttagtcttcactctgtctttggcattctgcagtttgtgaaacagtgataccatgtgttgagatgtggatttttttttattactcctgcttggtattcattctatattcaatatctgaaaattccattcacttgacctcaatagcttgattctgcaatttgtcacttccattaacttccattcttgttcacttgtttcctcttatgtttagtgaattttgattggaagctcatgtctgtgggggtaactcagttctgaatgatgtattagaaactttctataccaaacaacttcactcacttttttttttttcttgagagagtctctctctgtcactcaggctggagtgcagagagaggttcaatcatggctcactgcagactccaactcctgagatcaaatgatcctcccacctcagcctcctaagtagttaggactacaggcacacactaccacacctggccaatttttgttttattttttgtagagaccaggtcttgctgtgttgcccaggctagtgttaaattcccagcctcaagaaatgttcctgccttggcctcccaaagtgctgagattacaggcattagccactgtgccctgccttcacgcccttctgtatagctcagccaaaagatatacaacttcagttctgctttccaaaatatatccctagctttctggaaccagcagttcttatcttacaactggccaatacatagacatagatatgtcaccctttcccttctgaggcttccacttgctgttgtctggctgttgtctttgaatttatggagtattcatggtctcttaaggagaaaaaagaaaagggagatgagaagccagaagagaacaggaagttgaccacaaggcagagactcctcagcaaggagcacaatcacagctttacagggccagaaaacaactccagcagcgtggctgcctcttaaagcgccagttctggaagcaaattcccccttaacaatcaatatctaagtgaattttggaagtcctaggctggtctgagactgccggagaatgagtcaaggccggcttgtcctagggagggggtggtgagggatggaagccgctgtcctctggctccccgtcaactgtgcatgtcaatcccagtgacaagggctgctgatgcttcagaaaggtaccaggcctcagctttaaggcgcttgccaagaagccatgagaagtgcattaagatgctggcacatgaacagcacccaaacaatgctggttattagtggttcaccaggtgctttacagtttataaaatacattcactcagactgcctggtttagtccacacaacaattctaactcccttggaaagaccagagaactgccatttgataccttccactgcttactgcaagctcacctgcgccaggcatggggacagcaagggaacctcagccccatcttgccagtcagtgcctgcagaggggtcccggtgcccctcttgccatcagaagcttccctggccagacacagccatatgcatgttacttacatttgcacatttaatctttgccacagtccatgagatagtctgtaccagagggaactggggcctgaggtcacacaggcagtgcgtggtgggactcaggcatggtgtaggacacttgtggttcttgccccgaaaccagatttcaaggccaagggcaaggccagatagaggctcctagaatgtgccagagggtggcctgctacagcctcagccaaggtctgcctggggcattaggggccttgatggggatatcacgcctgcagtctcagggagcccatcagcggcctcctctctctggattccagctatggcttagggatccctgtcctacctttcacaacaggccaggggcctctgagtatttgggaatctgctcaaacattgtgggaaccttcctgcaatggcttcagtgttgcagaatcaatgttctgccaaagaaagtcactcacttcttatttctacacccctctacctcctaaacagtaggagggaccagagccaagggctgcaggtggctttacacccagtagacttagtgatctcatttctgtctccagtagtctaggttggatttcttatagttgtgaaaactttgagtatttgtttttactttttcttaaagctcgtatggtggccccaaactgctttcccattttaatgcttatttttgtatctcatcagagctggagatatttttcaatggttgaggctggccctcaaagtggagaaatatttgattacagtgagccatttacagcaagtagatttcaagcacaacactggcaaaatccttttctataagaaacactgtcttatatagattttccaaaaggctgaactgaaactggaaaggatgtcttaaggaaagatggatattaacaataggtttttaaaacctattcttctctagaacatggagaagagctccttcatgtttagaaagttggttaagaactagaatataagaactggggtaacaacacccagattcagcttccaatctggaatctggaagtccaggaagaaagggctggtgccaggtttggagagggaggttgaacctggatgttaccacaccagatagagagaaaacttccaaaggctcctcaggtccagtcaaaaggactcggcaggctcctgttggccaaagatgggaccgcttgggcttcttatagctacaatggattggaatgcaccaactaaggtgaaatccacgagttcaaaatgatacttaaaacaaaaacttctttggtcactcttggaggatgcttattattttgaaactgctttaaaagaaaaagaagccggcaaaaaatgtgttgtgggggcaaagagcttctgaaatacgcacatacctgagcactaccctctgggcagcactccaagtcctgctactcctagaaccctttggggacttcaagaaagccccagggtctgcgtcctgccccagagagtctgcttgaacaggtaagggaggctgcattgttgagagttccccaggcagggtggccagggctgagaaagcctgaggccagctctctgcttctactctcacctccagtccatgcaccatgcagcgccattcctcctgggtttgaatcccagctctgcctggtgggtaggtcatttagcttgtctgtgcctctgtgtgcctgtctatcaaatagaagaggtgggggtctcactggcccctctatcatctggcccttgtgagggtttgatgagtctgtctggcacatggtgaatgttggctgtagtagccataaccatttggaatggcacagagggcaggaagagacgttccatgagaaagatacaggggagggaatgtctaagagaggcctctctaaaggatgggaaattcacttttggaaaggagagatgggagatcaatcagctgggtgggcgagataacatttagagggcacagacccttcttatgagttgatgatggctttggttaccaagaaaaatgtacctatacacacacacaacttttgcctacaaatctaaggactcacagaccccccaatgtccgtctgcaaccccaacagttgaagtccattgccacctccaggttaaataactgtcatcaacgactctattattttgacaatattgatcaaaacattaaatgcccatactcttcaactaaataatttcacttgatggaatttgtcctacaaatgatgcatgtgaggaaaataacaactataaaagttgtttattgcagcctgttgattacagaaaagctaggaaatgatctcttcatccacaggggaccagttaaatcaattgtatctacagagtgaaacactctgcaatcttcaaaaaaaaaaaaaaaaaaaaagagaaaattctatatcccaaaatggaacaagaacaatctccaataatttgtaaaggcacagaccagtgtactcagtgtgctatgatttgtgcagaaaaataagaaaatgcatgtgtgagtgtctgtgtatatgtgcatttgttgaaggtgaacagaatatttccagaatgagaccctatcagccagtcagtgccttggtctcggggaagcagaacctcttgtcttggagacagttttgaatgtaggaccatattcatgtttacattaatccaaaacaaataacaggtacatttaaaaagaaaagaaagccacgtgggcattggaggctcacagagaattctgaatgggaagagataaggaggatggcctttggggagagtggatctgctcacctgaacagagcatctggaagcccctcatgggtgggagaggggctgctgcaggggccgggatcacacgctgaggttctgagacagttgctgcctgagtaatgacgccctgggaaccgtgaaggatatgtcaaaaagatgcatggtctcaggtctgtgtggccagggctccaggccatggctgggaggtgtgggtttggggtggggcagacaagttgctgagaagcaaagaggtgtgccaggggtgggtacccggtggcaggtttttctgcatagctgggcattgcttcagcatggcaggtttcatgtactgccaaccccaaattccttttcttactgctcgtcttaattttcatgacagctttgcctctccttctcttccctggcgcttaggtgaccacaggcttcataaagcctaaaaaacttcagactgagaggaaaagaccccagtcaagatgggtgcggctgttgtcatcagcacacaggtgagccggggtctcctggtcccaccacgggccaggcagtaatgggctctgtaaaggacacacaagggcgttgcccacggcgggaacctggatgtcccaaaggctccctctgccattgtgatgtttcaggatgaaggaaacgattgtccttctcattcaggtgtgcagagtgcacgttgtttaagtccaggctctcttgtctactatatacctctctctctttttaaaaattgtggttaaacatatataacaaaatcaaccatcttaaccatttttcagtatacagttgagtggcattcgtgttcattcacactgttgtgcacccgtcaccaccatccatctccagagtgctttccatcttgcagatctgaaactctgcacccattaaacaacaactccccactcttccctccccgcagtccctggcaaccaccattctactttctgtctacactgggtacctgatatgaatggaatcatgccgtatttgtccttttgtgactgccttttctcgcttagcataatgtcctcaaagttcatctgtgttgtagcatgtgtcagaatttccttctttttcaagtgctgaataatattccattgcatatgtgtgtcacagttggtttatccactcatctgcttatacacactagcgttgcttccaccttttggctattgtgaataatgctgctatgaacacgggtgtccaattagctcttggatgcacactcccgaaaaagaaaaaacagctgggtgcagtggctcacacctgtaatcccagaactctgggaggccaaggtggggatcacttgagcccaagggttcaaaagcagcctgggcaacatggcaaaaccctgtctctaaaaaaatacaaacattacccagacatggtggcacatgcctgtagtccccactactcgggaggctgagatgggaggaccacttgagcccgggaggcagacagccttgattttgccactgcacttcagcatgggtgacagagagagaccctgtctcaaaaaaaagggaaaaaacaagacaaggtttctcctggggctgtgcttcagaccccattaggcagttgctctgcaaaatgcctcatgagtcacagctctgtcaaacagatgtgcacatgttcctaccactgtagcatcccttgggggtttggttctgttcacccaaaatgagtgggagtttggttctgaacacgcagcactaaggggacctcaaaaaggacaccttatagtacgagaactcaaaaaggaaggcagagtgtcaccttgcttgacctcagctgggaatgtgtgttcatgtctggcaactcaagtttttcgctgctctgagcatgtcaatggctgtgaaagtgccaagtgtattaatttgggggttacaaatacatcttagcaagtaggtgaacttgcaaatacagaatccaggagttatgagggtccactgtattttcagtgtcgaaattatcttccatcaagttgataaaacctcatttactcaattaggccctagtcagggtatgtgaagtgttctagctttttcctattacaaatgatgctgcagtgaataccttgctgcaaagagagttctctcattataaactgtttctgtggcgtgagttccccaactgggctctcaccagtaaggggatgtcgctgcccatgccattaggctcaccacattccctactagggacacatatttggctttgtcctggtcaacgagacagagggaaagtctacctggtgcctaagaagggggtacagggcacaatggtccctttcttgctctggccattactgtgcagtggtgaacctggagctgtgaaatggaggaggagaaagaggaaaggagcctgcatcccagatgacacgaccgagctgctgacccagatcgcaggacacgagatagtgcatttcccttctgttaaggtcagtcccagccagcgacagcccctccacagcactgctgaggagcccctggtcacccatacccctcaccctctcttcagacactccactgccccccacgactcccaggccaaactcaggacacccaccctctgccattatgccgggctccccaagcctccaccacttcccccagtcctgggactggcaaactatgagtgagactcattcacagattgtgacttcatttagtggattatcaaccagcattaagaactgaagccaactgggcataatggctcacacttgtaatcccagcactttgggaagctgaggtaggaggattgcttgaggctaggcatttgaggccagcctaggcaacaaaatgagatcctgtccctagaaaacatttcaaaaaattaacagcatggtgacgcacacttgtagccctagctacttgggaggctgagtgggaggatcctttgagcccaggagttcgaggcagcagtgaactatacttgtcagcctgggtgacagggcaagactctttgtctctaaaaacaaaacaaaacaaaaagaacttaagcagactaggatataaagtataggagcgtattgtgtacaggaacgggaaatactgtttcctggatcttttgtttcacttacgcacacacccacacccgccagtagtgtaccaggttgcgatggaaatctctctctttctgtggatgagtttgtggaagcccttgctccagcatgccctccttcctgcccacccctggaccattccttcccttcacagcactgtcccatgggtaggccacagcccagcacaggccccagcctggcggctgcagcaggagccccatcccagggcctgaggggccatgcgggggtctgggtgggagtgggaaccgctgaggaaggtgaagggaaatatggtgagatgacaggcccgctgtcagggagagtgggaggagccctggagtgccctacctctgtggggctggaactccctgtatccgagctagggtcttccacacgcatgctcctaccccaagtgccacagctggaggtcagggacccagccaggctgtgctgggtgctcctgggcagggctcacctgactgcaagtctccctgtgggtggctcagagacccagagcccacctgggtgctgcttacagcccataaggcagctcccacccgcgtgtcactggccctgcagcctcatgaagccttgtgagcagccatccttatctcctttgtgctttgaatacaggaggatgctggctctaaaaggcagaggggcatcctcagttacccagcaggggcgtggcaggcctgtctccagtaccccaagaggaccctgaaaacaagtagcattgcatgaaagttccacactctgcagttcaacctagcacacttacaaaccctgagtcactgcatcctggctcatggagggagaatttcctttttctgtggctttaaggctagcaggaaattgccagcccaggcccctaaggcctccagtgagggccgggtctcatctcccactggataacagtgttgtcgggaacttccatccagcactggcggacactcccgtcgcagctgctcctgactgagcaagtcatttaagggggtccttggcactcataagcactcacagaatggggctggcagtgcgcccggcctccctgggatgggtccagaatggtaggaagcgcagtccgggagggaccctgagttagggccaggcatccccattcctgcttcctcctccccgaggaccacgtctgcccattcctcttttattttcttttggtatatatatatatatatgtatatataatttttcacaccattataattcctctttttaaaaaaatatatatgtatgtataactttcttagtaatttctgtagttaccgaatctggaaggaaaactaagaggccaccaggcaggccgtgtgatggaaggagtgaggggagaaggagcatccatgcagagggaacagcatgtgcaaagatgagggtcagtgaggacgtggtttgtacaggtaaattcgaggagctttgagggctgacaggtaatgctggctctggggaggtgttgggagaagagaagggaagggaggagccgtgtaatgaaaagctgtgctcaccatcactaaggactctggacttaacctgacagtgggggttttaggcagtggagtggcatgatcaaagccattgctggatgcagggaggaggctgggatgaatgaggcagagtttgggctggggcatccgttatgagtctatagaaatggttcagggaggggtctcagcttattgtaaggctttctttaaagttgatggaatgttttcttcccagtttcaaggcacagcaactgtcggttgtgagagatgcttctgctaccacttctattgctcacggcaaggcaaaatgtcagtctagattcaaggaggtggagaaatagattccacttcctgatgagagaagaatgaatgcagagtttgcaactcgtctgttaaagggaatgacaaagatgcaagaagagttaaactaaagttcattcagctggcagtatccaatccagtggtgggtggcagcagtgccaggaatagcattcaggcagcagcattaatagtgacattttttgtttttcagaatgttttagggtagaaccttggccatatttccagcttaccagtttcccttgttttcacctattttctgagcctgatttttcagacttcccattcactttggagttgcatgatatccttttaataaatgccctttctgcttaatttagccagaggctgcttctgttgtttgcctctaagggtgctgactgattctttggtcaataagataatcaccaaggactgtacagtaaaataaacaagataatttactaaagaggaaatgcaggtgggtaataactcctgagaaatgtctcacctcacttacgataaaaacaaaacacatctgaattaaaacagtaacaaccagatgcttttttgtttttgcctttacaatttgcaaattcatctaatcacagctgcagagggtatggtgagacaagctttcttctactgctagtgggagagtaaactgacctaaccttttttcctgtagatttcttggctatatgtactaagatcttaaaatgagttatcctttgtcacttccaggaatttagtctaagcaaatacttagaagtatggaaagaaatttatgcacgaaggtgttcatattttagtaaaaattggaaacttgaatgaaatgaggcaattaagatgtgatataataagataataagcagaagcaaccctttcttagaaaggtttgtaaagaactgaggattggccaggcatggtggctcgcacctgtaatcccagcactttgggaggccaaggcaggcagatcacaaggtcaggagttcaagaccagcttgaccaacatggtgaaaccctgtctctactaaaaatacaaaaagtagccaggtgcggtggcaggtgcctgtaatcccagctaccgggaggctgaggcaggagaattacttgaacccgggaggtggaggttgcagtgagccgagatcatgccactgcactccagcctgggtgacagagcaagactccatctcagaagaaaaaaaaaaaagaaagagctgacaattataggaaaaccttaatggaataatattgagtggtacattgttaaataataaattaaccaaaaattatacatgtgacatttgtcgttcatgatccagtggggaaaataaactaccctggacattttaaacaaagggaatttattgtgggaaatgcttcacaggtgatgaacagcagagacccaatcatcatggaagcagcccagagatgagtcacagcaggaagccactccaccatcagggctgcagaaagtggcattgggagagggcagaggatgggcacttggtggcagctagaatcatggaggagatgcagctactgatgcaaaactgcttcctgaaggagagagatggtcaagtaccctgccttatcccttcttttcactaccctgtctcttgctggtgtctcccaccggccatatccagctggaagccaattgccaatggaaccatggacaggaaatggatctgagtagatggacaatgaccaccacacagcatgatctcgactagataaacatgatgcatgttaaatggtattacttctgctgacagggcgatatatggcttttagtttcctatgtttttctgtattttctaaagaaactgaacaatattattaaaattaaataagtggaaagtgtgtttgtggcagatacaataacgtttttaaaaagataatgtgtacgtagggaaagatgggatgttgttaaacaacagacttttatatgctgtgtctccccgtgctccctccagctttagtcagtggccctaaaagggctagtgtcctggctgcatggggccagcagggggcgatccagtctagcacaaggccttccttgaccggcggactgtggctgggatttccttgcatttcagagcaggaccctagggcaggtgtcatcctgtcagctagctcctgcccccaagaggtttgtctctgtcagcctctaactcagagctgacccttcctcccatttcaggcaggctcttaccaggactcatgagaaagccaagccaagcaccactggcactcgagggtccttccttgtccctttgggtgattggcacggttgtccactgagcccagagcctcactgtgctcattaggtgtagcctaagggcacttgcatggaggtgccagtggtcactgcttagagctctcagccctagatggcgtatcacagttaatgctctataaaacccatcatggcttttccctagtaagcctcaaatcgctgcaagcaaggcttcatatatgagagtttctgctgtctcctggagccatctcacccaaagccactgactctgggagaccagcccaggccacaaaccagcaaagcaccagttatagttagagctgcattataaagtggccagaggacatttctttgcagtgagatgtgtatcgtgaacgtttggggcctgtgctcgcctagtcctcatctttgcttttctaggtacacaaagccatcccatggctgcaaatgttagctgggctgggctccctacttgcctcaagccccttcatagacccttcaggcacatgcttttctctggacgtttacagacaggtcctcagaggtcagagcaggttgtcctagggagcagggaggcttcctagggaggtcagactccaaatagtggatatggcaaaaatgcagctgcagactcatgaggagtcgccctgggctgccactagggctcccacagtgtgcgctgccaacctgctgcccgtgcagaaactctagggtaagagctggctcctggagtcccacccaggctgcgtgtccctcacagtctgctctgtgtctatgtgtgtgtgttggggggatattattggacaattcaagggaggctcagtgaggaggaaggaaaatttcatgtaattctttctggtttgtctttctcaaccccctcctcctgcctactccttaactgagagagtgtactattatttgtgtgaccctttttttcctccaatacacatagaaggttgtataattatgcttttctgttttggaaaatgacttaaaatcatgtaaagaaaaagcttacttaggtgaaatgtagataaagagattgtgtcagcaaaatataattcttaagggtaacaagggccatggacgcaattttaattgtgaaaaataagcaggatttcatcaaagtaaactactgcaggtgagaaaagttgaactgctgtaaataagcattatcctgggctgataatgcttacaaatgttgatcctgaaaattcttcaggtacctttcagagctgagagttgtgctctctggggtgacactcaaaggaaattgggtccttttttaagcataatcttcttgggtttttagtacattcttattttttattgaaatatacaatgaaaattcatcataatacactcttactcctaaaagagattgctgtatcataggacatgtgtgcatatgaaattttatatttatgttgaaaagttttgaggagaaaagaagaatcctttctctaagtaactttatagattttgtttttaattgcacgcatacaacaagttctcattaattataaattcagttcgtgggcaaaatatattttctgtgtgcccctttctataggaaacttgctggattatttctaattctgagtctgtatctgagtaataatgacaataagtaaatgatcccaaatatatttatataagtaagagattgcattctagaacttattttttgaataattttctataattaaaatgacaaacacttttgcaatctgaatttcatagtaaggataattctaaacaaattttgaaagttttggttttagaagaagttcaagaactatttggctctgcacggagagcttacacaagttgtatctctaagccctagcttcttgctatgcctttattaacataccagttttggggttaaaaacctactttagagctaaaatattttattaaaaatttaaaaaacctactttagagataaatattttattaaaaatttatcagcctgggggatatggagtggtagagagaattacttcccatggctgctcccttgcactgtttgaatattttaccaaatgcatgcattgcctttccaaaagaaatggaaatattttcaataatcaaatcagtaaaatttctgatgcttttcagttttttatacctacttttgcctttttgaatattctcaagaatggaactagacaaatgtaagtgataaattagagagaagtgactttaacttaaacatgcatctgtgcccagacatacccttgttaatttattaatattttagacaattgtcagaatctaaagtatttccagttctcaatctagaatggctaagcttatttttatggttctacatgccacttgacaataaaagatcatttatgattctaagaagcatttgtctctcaagtggcattgtaaatcagtacaatcttttgaaaaggaatttagtaacacatttcaaaggccatgaaaattccactccctgtaagtgaatgatttcagtaaatttaaaagtcaaacattagaaggcatgccatgttgcctttcacaaaaataattctgctaccatccctggaagctgttgttagaaggtcatgttcaataagcttacaatgttttcctgattgttgtttgtgtgaccattaaaatttcaccagtattggggaatttttacctttcagatcatttagttccaactgttaggaagcaattagctcttatgttcttctggttcgtgaaagtattttactttgggtgcaggagtagggtctctggggccatggaatgatccacacaggccctggcatgggagggactggttccatctcaatctgaaaatcagacaaaggtttatttcttacttctgttatgcaatgttggcaggttgttctgactcttttccagttcctgaatattacttgttgtataataaaaatgatattctaactaaaaattttaaagaaaaaaatttgcaatcttgcagtttaatgcaaccatagtcttagcatttttgtctgtgttctcttttcaatctttgtttataaacatatatgtttctacatagagctgattgtaagaggtatagaattccacactttataaatgccttgttaatttattgttttccatgttgtcacatagacttcaggggtctcctctcaactgactgcaaattactcactgagttggtgccccattatgtcctcggtcatttcccctatcgttgagcatttacaacttttctaatgattgacttttaaatttcttgaaattattgagttaaagggagcagaattttaacaacttttgttatgtgtcactaaatcccttttcaaaagattgtactgatttacaatgccaattaaatgttttacaagtattattttccaactatgtgaggattatttttgtttatttccatatatctctatctctcctctccaaccagccaaaaaataaaaataaaaataaaaataaaagtactcaagggtgagttaggatatagacatacatatatgcttatgtgtttacatttactacgaatgtctaagcttcaaatattgaattctacagatattctctcactgagagacaagaataactgacttatccaggctgcaagtctggtgcttgttctatttgatagtctgatgctgtaagttttttgtcacaaactctgaagagtaaagtggaaactttgactttttgcttctgattgcagatttctatccaaagagggagttgagggaaatgcttcctgttgtcctaattacacagtactaagtgaacactggatatggagtcagaagggaaagtagacttgtgagcccatcacatatggagaaaacacttttggttcccattgttggcagggacagggaggcaggccatgttgcctttcacaaaaaaaaaaaaaaaaaaaaaaaattctgctaccatccctgggagctattgttagaaggtcatgttcaacaaactcgcaaagtgttttcttgattgttgtttgtgtcaccattactcaacgttgtgtagaatgtagtcaggtgatattatccccaattttataccgagacttattttaggtggattatatgactcagtcagaatcgcatcaaagcagaaccagaaccaagtttgttttcaactccagtgcttctttccgaagttttatttccattgtcagccacttaactattttaaaacgtatcttttggaatagggatctctcaataggaatccacagcaaagatgaagagaaaactagatcagttgccttggcaattttgtccactcagaccaggacattcagggatttctagattgaatttgtgtttccttctgactacattgttgaaatgatctggatcatctcctaatcttgctcttggactctctaggtgtattctcagtgtctgtgagggagggcatgtgttttaagcagtaaattcctaaaggcctgtggaggcccaaggccatgcacactgagggagttgtggatcaagtggcatgatgggcccagtctatttctggcagagctgttattttagctgttattctctttggccagttatctcccttagagtagtgcctctttaaatgctttttcatttggtgaaatctaaaaatttgtctctaaaaggcatgctgccaggcctcttttcatattaaagtggtcatctccacattgtagatagtaaatcatgttcaaagaaaagaccttaaaaattcttcatattgccttgcagaaatcacagtattttagatgtgttggggagcttcacaatcactcagtttaacccattcatgttacagacagggaaactgaggcctggtgactttcccagttattaacaaggtagtgactgagaagggacttcagttcgctgtttttaatgactgtatagtgagcatctgatgtttggtcttctacagaaagggaacagagttgactaaagtgaaaataccctagttcagacatcagaggcaaaaaaattaatcataatcacaacagcaccttacagttgtggagtcctttatagtttttagactcttagacacagagaaatagagaaatataaatatggaaaataaggtttatttgatattttatgaaatggaaccctaattcaccaacatttttacccctttatagtactgcaataatttgttgtgagactctgaaatcgtttctgaattatcagaggaagaaaatcatttaaaaaaggaaaccagagctactggctctatcttacttcggtcatggtcttttaaaatctattcaatttattttaactagactaattcattcttaaagtaagtcagctaacatggaattttctgaggttacttaaaaaattttggaaatttccttagctctgcatgaagtatttttatctcttcttcttcttttttttctaaagaaatagtgtttgtgggtcttgataactgcccacaacagattttatatcatctggttttgatagagcaagggggtctaatgaatgattgaaactaacatttataaaatctttcaaatttgagaggcaggttcttggaagaaggaggatacaacagaatggcctctgtgtcactggtaggactctgaagacaggacttactgcctatgttccgacatgaagaaacagactagtgaagtatgttgtcaaaactttgagaattgtaaagcaatgttcacatgtaggttgataaaaataacagaagaagttatgttaacctaggtccgaccctaggtgctgtcatgttgtcactaccttcataataagcttcaaagaggtgctctgttattatctttaaaaattacagacgaggaaactaaggtttagacagtgttagtaacttgctcagggccagtcactcaatgtgtggcagagctggattccaagtcagtgctgtctggctctaaagcttagattcttttcattgcacttttattattaaaccaaagaacttatgattaaaatattttctgctttccttgacgatttatttcaagatctaaccatttctttttcctggacattctgagcagggagcactagctctcaacttccctgcctctaccctctggctgggctgcaccttctcctgctgcctgttcctcctgcttcatcagcacacagtgggactatacattagccagggtgttagacaggccctccctggaccttgtcttactttcccccttgtgttatgaggacaagctctgtagtaactacattgagaatcttaggagcaaaggctccccacccccatgggggcacgtcagtgacatttggctcctccattttgcttaagaaacctgtgaccagaccctcaccccaggcccatagtgagaaaagcctgttttcatttcttctttcaccaagcccatctggatagagcaggtgcagggctaggctcttaaaatagaagcccttgtttcatgtgacgtggcacggtggaaactcccttgcttccttgcctgttgatcagattaatgaaatgatgaaggtctctcccctcatcgtggtgttttcttgacttcctgtcattgtcagttgacctttctagtttcttcatttgtaaaatacaggacttgttcttcataacctcaagggtccctcctatctttgataatctgtctccatgcttccgattaggggtcagattttggaatttaccatttctatcttgtttatttctcccagcaatattattccagcaggaatagctgggactaaaacttattcttggttaaagcacatcatctcaccatcttgacatcccatttgctctataccatcaaccatctctgaccctgaaccccagtctccttctttgtaatttaggaataataataccttattcatggtgtgaatcatatgagagagaggatttaacattgcttagcaagtgatacacattaggcattcagacaatgcttgttcacttggggtcaaataataaggtccattttctcttcatgacttctagctattgattagctttgaggctgaaaaataagtttaagatgggccctctgacctcaagaggctagcaatattttatcttctttttaacgctatctcctataggaaggaaagctagcaatattttggataagacaaaataaatacatatgaaacagagaatggattaagtctggaaaatccttccagtgctacacctaggacaaggtaccccatgcagagcaggtaaattcttaaaaggatggtctctgagtcaaattttggagagtgaagtgccagcatagctgatcatcctaagaaaaagtcaagaccgcaagttatgggttccaacagtggagaaaaggctaaggaaattatgcactgttagtaagatagaatgatgtgcaccattcaaaatggtcaatatgatgcataagtagaaaaaaagaagtgctgtgaaacaacagcaagtgaaagaatttgaacacaaaattctagtaatagtgtcaatggctatgtatgaagatactcagataaatgttagaaaagaatataatgtgggaaatgaaaataatagatgtgttagggttatgggtttttggatgaatttcaaaaacattccttttattaggctttcacttcttaagtcaaacattttgaaaaatttcacattgtatgacttggattgcataatataccagttcctgggctaaggttccatctttctctggggcaggatttcctctctggttttcatcgtgatctctgcctttgaatggcttgctttttcttttaagagaaaaaagtatgacaaatccagtaggtgatggaatcctctctcttccatttatatttctgtggatcttccttctcaaattgcctataacttcatattgaatctgaagaaagggagagtttctaggagccctgatataagggctcagggatttgtgctgccatttctttagaaaatgcctgattttcccaagaatgggtcagctctaatggaggtacctattccttcaaggaaaagcagtcaacttagcaaacaggtaattccagaggtgatttacgttttactttggcagatggagccttcattttcaatagaactccctgtgaacttcctttaaaagtgttttgacttttctggaacacatggactccatgcagtgacgtgcccggtaggcagtaatgcatacttagggctggccttccacagcttgagtaggtgggttccctttaaatgaaacaatctgaagagatgcaacacaactgtgacccttggtggtcttccagcttttaatctgattcaggccactcatttcaaccctatgcaagccaatttgacgcaaatgagtccaatctaaccagtccaaaaaatacttgggtgtttgtgccaataaatctaacgatcaaatcattcccccttgaattagaagttaacaagacaggatagctcatactgccctctagtcattcctgccaccattaagaagcctggggctctttcttaccccatgtgccaacttctcagggcctccttgtctaattttgcttgagaatgtagagtagaggaaggagaaatggacagacagcctagagaagtgacttacagtctgggttcagctctaactactaatagtgttgaggacgtcagtcagcttctcgaagtctcagtctccatatttgttaaaataaagagggtagtctggtttttctggccccttctctcctgtcctcctagactatgaattcatttttagctttttaatgcaaatttttgattcattagaatctagcttcttcactctgccacttttagttggctcttcttagagcattagtgcccaatttgcactgttagaattttcccttgtttgtacccttcaaaatttttctttttttgggcaaggattgtatttttttctttttaactggctccttgaggatagatgttgtgatatctgtgtgcttgtatgtcctcaactgtgccctgcactgttagggcccttgtcaaaacaacacatttctcagtgattctgagactctttctcttatctatagaagtcataactcaagagtaaaatcataccaatattttacataaaccctagaatttttatagatctattatttctttttagagtacatattggaagtaacttcacaaggaacattttctttacttttttttttggaaaaaagatttatgcttataaccaaatgaggttgtttggcaaatttgtctggagagacacacacactcagggcaaataggcactcctttcctgggcaactcaattacctcttgcctctggtcaaaccactccacaaataaagtggactgatcctcttgactctatgtgtaagtgcccattgtgtgtgcacagagctggtgagaacggccatggtgctaggtgggggtggtgttggtggagttggactagattatctgggatcatgcgaaatggaaattcatttctagctggctggcttcagaaggtgccatctcctatttttatatgaagcgtgctttggaactcagggcaacgaagggtgggtgtgctgcacaaggacagcagaagagtgagctgactggtccctgaaatcgcagttggaaagtggattaccagtgcagtagaactcttcacggaggcctggaccatcaggtctaatggtgttgttccaggtgggtggtcatgtggagcaaaaatatttgaaatcagcgagcacgtacctgagagatgacttttccacttgggctagtctcttgatatttctggtcctgtttcttcatctgtaaactgggttagtaatgtcacactctgtgagttggtgcatccagataacaaacaaacaaacccacacacagaaaaacaatccccataaatgccctataaacttatattaatcatcaacaattcatttatttgttcactcacttatttattcaacaaatactcgtatgaccaaagcactgtgctttgtgctaagctctacaataaatatagaattgtataaagatcaaggagtaaaaatcctagttcaggtcctcaataaatgataggtgaatcatagactgaaacgtggaagtaaagtaaggaggtcttccacgactattgtgatcttcaaatgttcttttgggtgcagagtttccccgggaaactgccagtttctataatggacaaaagactttgcttttcaggagtatatattttgataggaaataaagatagaaatacttggaacttagacaaattaaatacataaatgatggatagtatgtagggaatacagtactgtggggaatcaaagagagggtgaattctgggtgaaatcaggagggtttctcattattcacagatgatctcttacaggaggtgggaatttttaggtcagctggaaatggaaccaggctttcatgttcagatatacttgcagataaacaactcataagaattataagactaacagcttcgttagtttacatttgacaatttatttgtgcctcattattttgggatgtgtcaagaatctgataacatgggtgataatgctatttgccactgtaatatcaggtagtcctagtgaaaatgcaacttttaagaacttgtttaattgtatctaccaactcttactgcagaatgtagacttgaaagaagcacattcctttttcttacataatcattaggggttactacatttctgagcaacaaggctcaagagtttccaatggaaatgtaatttcaattagaaaaccaaattgaggttgagggtggagagagccagctgcagaaggtatctggacagcagcatgtatctgcaggcctgcgtgtgtgccagggtgggggcaaggaggggtagattgtgtcattttccacatatgtttatttagcttctcctgtttcagggactttgggttttattaatagtcaatttaggatattgtgcctccatcctcaagcattgtcaatcttaaaaggatgggtgggagtggtaggcattaagcctcagaatcttctagccctttggctggagtggttctgtctgctattgctgcaacctgaggaaatctttcaaattctgggtgggctgctctggttaatatagtggagactctaacaaaaattatgtcatccagcaatagagctctggtgcagtgagtggcagactaactgatgaacatctcaatgcacagcaattctcagcagccctcagccagggcactcctagggagggcctctggttacaatgctcttcagagcctgcccagtctgtctctgtttctctgtcttttctttcctttctcattattcccatcactattattgtttctctttctctaaggtctgtatattatcctttcccctagttctttgaaaaatttacttcagttgcacacacaatagaattaaatgataaacatcaattttctaaataaaatgctgtgtacacccacactcacacccacagagtattttctatttcttaacaacaacaagaaaaacaacaaaatgcatagtaagaattaaaaaatctggaggaatattgaaggccagggcagattatttgtttagattagtgatccttaacccagaatttcctcacatctagattattgtctggtggatgacaaaggaaaatatatattggaaacccagttgtggatccttgagaatacagtagaaagaacagtgaaaattgaaagggaaaaggtgagaaaaccttcttattcatgtccaggaacagaattgggcttgaatttggtggctgcagctctgaacggactcaaagtgagtgtctgtaaatcctgctcagcaacacgaggacaggggttgccatgtcctcctcttccttatgtaccttccctcatctgcctccctatctctagcacatggaccaggggctcataaatgtctgtaggatggaaaaatctaggaatacatgtggggtcagaagttgtaagagattgggttgaatatattctgattccccaagttgtttttgtctacttattttctttttcttctctgtgatggttctttttttcttgttatttgtatctttgcacaatgaaagacaaaaaaaaaaatagttctagtcactagaggacttcagtaaacatgctatcacttacctgcttatgaaccaagaggttgggaaggcaggtctcagttggcatgtagcccgagaagagtttgtcacatcttagagtctagaacctcctttcccacagagatacaaaacacacagttaactcactggtattttggctgggaagatagctgaatgatagcaccactttaaatcatatagtgatgactgctgctgatgatgcacatttcttttcagtatgaaatattagttttttgggaaatccaatgttcaccctaatcttgcagcattttgtaatttccatcatggcactgagcaggaggcaggatgggctgaagggaaatacactgaactgaactggatccttaggcctgtgggtgagacacagtattggcagatagtgccttcaccttgtggctcagtttcttcaggtttcaaaattgagagacttttttcacttttacatgttaagtaggtaaggatgaacggaaggattgtgatgtattgcatattggaagaaacaaaggtatcaggtcaaaattaagaagggtttatttgtggaattactgcagggagaatatccactgagctcagccattgaactcaagaacctgttagtaattaagaatatgaaaagattgtgaattgagcaccttctctgcaccatgccccgtacaaagtggattatacacaatatttcatttgctgttcacagtgatgttgacatagaggtttattgttattgctttattataaacaagtaaccccaaacaaagaggggataaaaaagtgatagattcccatgtgagagctcactaacccatggtatcccaatcagagggctagagcattggaatgacgtgtgaagacactgttgatgttaggtaattcccaggttggttaatgtttgggcaggaggggtataacttctctggcctccaatatgtgttaggcaccccttctgtgtgcttacgtagagctctgtaggcactcctctcagctccatttctccatgttgcaatttctggttatttgtttatacactactctaggagctccttgaggtagagagttctgtcttgttgactatgttatctgcaaatcttcatagagagccaggtacatggaaatgctaatacatttctatggaattagtgaaggtggacattcatacgtccaggcatatgaacaggtttttctctggagttggtgttgtttggtgtagaagggctgtcaatgagccttatgacttgaggaaggatcaacagatgggtggatagaagtacagatggttatatgcatggatggaaagggaatatggtagaagagaatgcttctgtcatgggctctaggaagtttactgaaatatattctgaaaggttgatatgtatagttcatccttattcttcccagcctctcttttctgagatgaccaaactattcaacataaatggtttcctgctgctcttaaatatttccaggacacttctgggtctcctgaagcacctgcttgctcacagcttcattctcacgtgaagtctgcataggtcctgttaccatatcagaactcttagaggacacttattctgggctgaggttttccaaggtgagaactccaggactggagatggagcagtgcatttaggtgaagtgatatcaaacaaggttggggttggtgttacttcccatcccagtgctggacacagccttggccaggtcctgttgtgaccccaggtgcacggggccttgggaacttctgaaagggtgtggagtgctccacccagccctgttggaggaggatgggagcgaaagcaacagatgtgctcaaggttctgttttcagttccccaaagggtcttctccttgaccaaagcagtgtgacggttgctatgacagttgctatcttggtccctgggactctccctcataaggtagcattactttttttaatcttctcaggcaagtaaccatgaaactctgtaataaccagtctgaggtggggctggttgggggcatgtttgggcctgagtactgggatgtgatggtggaatatgctggggtaccaagaggtacctttgattaatgagttatttttccaaattagaccaacactcctcctagttgtcttaggcttgatgactctccatttctgcagaagttcagaattcttcccttgagatgtctgcaattagttcattgttgcaaattataaaaacataacaggtagaaagaacactgaccttgaatctcaaatctgtctctaccaggtcatgtcattcagtctctgcttgggtcttctcatgtgttaaatgagagctttgatttccaagctccttttcactctgagagtcactgatgttttgcctctgaaaatggcaaccatgaagagtagttactgagaaaccagcactgtgttttagagttagggctcttgatcaggctgcctcattttgaatcctgatttgggaatttctgatgatgtgatcttggacatggtattgactttctctaagtcttagtttttttttttttttttatctgcaaaagagggtaaaacaagctaccccagaggctgctggaagattcagtgacatgttgcttgtcagtgttgagacattgtatccattacaactatcatagaataaaaacctgttacaagttggcatgggccgagctgccagcaatttcatacatctcttttatgcctattttgtttttcattttgatcatcaatattttaatggtgtgtcataaattgggggctctttcttatttgttcttggacccatggtgaaataaaagcttgtatatttttttagaaggattcatagagatgaaaggcccttactgaacattcagtctgaccttattagttttaaaggagctgactgagacctaactgttattattacaaactgatattattggaaaccaacacagaacctaccatgtgcaaaactgtgggaaaggcttggaagtctgggtttgacaacctgagtttaaatagtgattctttgtcttactagctccgtaatcccaaacacgtaatgcaatctttcttagtctgtttcttcatctatgagacagggctaatgagaaacatctcagtgtatggtatgacagcaaagggggtcatacaggtgacagtgctagcaaatgtcagtcccctcctcttctctacctcccaactcccttgaccctctcctctgtcatcccttttctggctgcgtgcagagaatcttgctagctttagggatacaaaaggttccagagttgggagacagactgttctcatacagagatcaataaccacatgatatgggtagtaagggccattcagatcctgagaagagtttggcaggtcaatggagggtggaaaggatgagaggaactggggagagagacagagaagagggaaggaaaaggaagggagaaaagaggacattgtgtatctgagaacaggaaaggagcaagtggaatggaagaaggagagggaaggcagcaggtgagggcatgtctgttggggtgtttatggagggttttttcagggaaagggtctgcaaatggagccaacaagaaaggaactggcaggtggtcaggatgtcctcctgtgagagtcactcttctccccatcctctctcctcttagcttcaccctcgctagaacttttccttgctcatttcaattttcaagattttcccaagcttctaaacctacaaaatctaagcgacacacatttactggagaaatcacaaacagatcccagccctcctgtggacctctctgcatctgtgccctggatacctctttctcctttgtttctgtggatgaaacatctgtgttcctagctgaggatgatacctctacctgtcttcacccacccttctcacctactcaggaacattgctccagcaatttctcttctctcctcttcagcaccagcttttccctttctaccaaatcattcttatcagcacttaaaaatgctgtcgtttctctccatttaaaataaaccctcacctgtgtatcatgtagaactatcaataagaaaaatattaaaaaataagaaaataaagaaaaaagataaaatatatcctctgtagagcccctttgtccttccagtgaccacctcatttctctccttccctcttctaattctctccttgaaagcattgtccatgcatgctctctccaatttcttcgctctcattctcttttgaacccatttggatcagacttttgcccctggcattctatagaaactgcacttgtctagttcaccagtgattcccaatatggctaaatccaatggcccatttccattcctaatcttggttgacttgtcatcagcaattgacacagttgatccattttttcctctttgtaacatttttcctcttggatcctaggataacaacactgtcctgtttttttcatctccttctctagccagtctatttcaatcttcttttctggttcctcctcatcttgctgacttctttacgttggagtgcctcctggctcagtgcttggatttcttttttggtatgtcgttgctaggtactctctcccagtctgatggctttttacaccatgtgtgtggtgatgacatcacgtttgtgtctccagcactgacctcttgcttctgaattctagactcttatagccagttgtccatctgacatctccactttgttgtctaatagacatctcagactcaacgtacccaaaacagagctcctaaagcttcaggaatcgagactgtgtctattgacataaggataataaaattgattaggggaattaaataaaatagaaatagaccaaacttacattgtcatttgatttccaacaaaagcaccaaagcaatctaatgggaaagaaaagtctttacacgaatagtgctggaattttcagcagctcatgaaatgtatatatattttatgaaaaaaagtaaaaataaaagtaaaaaatggtgctggaacagctgcacatccacatggaaaaaatgaaccttgacccttacctcatgctatacacaaaaattaattccaggtgaattaaagttgagctcccaaacctatgcctatgttctatagacttcttcatttcagttaaggcaactctatccttccaattcatcaggctgaaaaccctggattcccccttcagttttctctcttccccacatcaacactagcagtgcttcctggcagggctactttcaaagtagcttcatctcctgcttggattatgtaacaggctcccaactggggtttccacacatcttcctatcccaccctggatgggttattctcatcagatcacccagagaaatcctgtttatgtatgtcagatgatattattattatttttattatttttgagacagggtctcactctgtctctcaggctgcagtacagtagcacgatcacagcttactgcagcctccacctccctgggctccctacctcagcctcccaagtagctaggactacaggcacacaccaccacgcctggctaattgtttgtataatattttttgtagagacagggtttccccatgttgcctagtctggtctcaaactccacccacctcagcctccctaagtgctgggattactggcgtgagccaccgtctccggcctcaatattattattttgctcaaagcctaccagcctcatctcacttaaaagaaatgcttcctgtgacccacaaaacccgacatgacctgccctccctataaccctgtgtcatgagcactccgggcacatgcccacctcagggctttttatttgcagttcctgctgtgctcttacctatttatccacatggtttacttcccacttcatttaaatctttacctgaatgctaccttcttagtgacacctttcctgatgaccctgtcaaaacttataaccctcctccaacaattcctgcccttgctttaatgctctgtttaccccgtcgttatctaaaatactatattttaaaatttatcaatctttatcatttatctccccagctagactataagcttcacaaaggcagggagttttacctgtgtgatagcctcaggatcaaagacagtacctggcacatttcaggcattcaatacatacttactgaatgaaagaataaagtgtggccaggcgcggtggctcacacctgtaatcccagcactttgggagactgaggtgggtggatcatctgtggtcaggagtttgaggccagcctgacgaacatggtgaaaccctgtctccactaaaaatacaaaattaaccgggcatagtggcacatgcttgtaatcccagctactcaggaggctgaggcaggagaatcacttgaacctgggaggcagaggttgcagtgagctgagattgcaccattgcactccagcgtggacaacaagagcaaaactccatctcaaaaaaaaaaaaaaaaaagactaaattgtgattgaggtttacagatgactggtcagtgtttcccatatccccaaactgttttcctgcttgatgctattatttcatggggcaagttcaatttccttatccattgcttgactgtccaattagattggcagagcgttaatggcaaggactgtgtatcttatcttgtactgttctatatcctccactattgctgccattgtgagggggaacaagggagtggcttccctccatccagttccctacatcatatgtcatatcatacaaatatattagtatttataaatatattaggtctacctccttctctgtgcaaaatatgtcatatcaatgtctgagttctagtatgttcatattcttgggcaattatgtaattatggcttatgttgtcataacttctatgcccgtatttataagaaaaaaatattgagagcatttccaggaaaataattgactggaagaagagagagtggtaaaaaggaattaatagtgagctaactatcagtatatacaagcccagccttctaggatctggataacccgaagcaagaatttctctgtcagttttctcatctgtataatggtgagagtgggggtgttgaagtagaaaaatcctttgattaatatttattctaatccttgactaggtgctcagtgttagtccagggaactctatcttatttcttcatgggccagcttaatgtcaagatccaaaactcttgtgtaaagcttgggaccattttcaaggatacatttagtagtttacaataatctagataacactgactgatagaaatatgcaggaaatacagaaaattataatgtgatccacatatataatttagaagttttcactagccatgttataaaagtaaaaagaaatctgtgcaatcaattttaataatatttttgtttgcacacaagatatacagggtaatctcaacatgtaatcatataaaatattaatattttacacgtattttttgtacaaaatgttaaaaattggatgtgtttttacacgtatagcccatcttagtatggactggccttatctccagagctcaataactctgtgtggctagtggcaggatattggatatcaagtctagaacatacgtgaattaattcaaggttcaagcacattaaggctgaaagagttatgactgaagaacaagttcaaggaggaaatcaaacaatagccaaatttcactgagctactccttccattactaatgataacaaatatttatagatcccttagtatatactaggcctgatgcttagaactttatatgaactgtttcatttaatcctcacagcaatcttacaagtaagacctccaccccctttcagatgagaaaactgaagcacaaaagtgcagtaacttgctattatgacttgtgagcatattttcccaggcaattatatgcacagtatgatgtaggtaaagcagcccaataatttattcactatatttctccatgctcatggtaaggactgacttgatccctggtggtcacccacttgtgctccctcagtgagggaagggctgcagagcccctggcccgtgtcctagtgactcaggcttgggatctccagcagctgctatggttgacaatttagtttagtaaaatgttagatcctaccctgataactgttataaaaaatcctccttccccttccccagcacaggtacccagcccaaggggcactttctatggaaagatgaaaagaactgacatggacttgagctcactgggggtgcaggtttcaagaaagaacaaagagagctgttaggttgaagagacgcagttgaagagttaagtcttggaattgttaatacctggaacaaggcacggtgtgaaaagacaaagaaacacacaaacatcaatctgtcctcctcttttctctttctgtttcatttcttatcctccatcagtcagactttgcttcctctttctcctccttcacctcctcctccctgcccttcccaatttctttctatcttccatttattgttcttccaaaattcgtatactcatcctctcttctccctttctcttttctccaaaataatatgttcaacttactgacttgctcagggacttgtgggggcgaatgtattagcaccaaacctaggaaacatggcgaattctaaaaacttgttctcatagaaaaaagagttaaaaatagaaagctacagtccagttttgaagccacagaagacctcactctgatgtatagacattagagtcagaaaaagactttgaaaagaccagtgaagctccttgtcccacagacagtgtgagggagggacaaggggaattgtgtgcccaagcgtacttgggatggtgtaggtggctgataagagtgtcagtggaggtggtggttagcatttggagtgccccaatcttgtgacactaaacatttattgttatactaaccccactgccaactaccaggaagttttcatttttcttactgtgtcttagtctccatggcatctataaactgttttcccccaatgtccaggcatcattcctctcccacagttgatgtctggctctgtgccatgggtgtgggcctgcctcttctctctcagaatgactgctgtttcatgcttggtgagccacgcagtatgccaagctgctgtctctgacctggagaaaggatacccatcctaccacaggtggggcatatcatgggatggccttcctggttttccttggcagacacatttttctcacttttttttttctctcctcccttctctttttccctccctctttgatttcttctcttttccttttctttctcttgcctcacttctgccctagatctaccatgggacccagggagctttggagccatgcaacccacagtgtgctaagctttttactcatgctatttcttttaatcttcacaattctttacctatcaggcattaccatcagatctgcaccttacaggtgagaaagggaggcccacaccgattaagaaatgtgctcagggccacacagcctgtacatgtcagagtaagggcattctcatgccaaggttcattttcagagccaaaagcataccacgtctcaggagaagcaggctagatctcttgtctgcttggcttttaactcatgctgacctgaactttctggatttgagtaactctcagacctgtggagcccgatttctgtgagtggattttgccagccacctggggaggtgaacccttgctggggtatggctcatcagtgtagaagggagttccttcagaggtacgctgtcttctcggccatccccattgtagtagtttcttgggtctgccctaacaaagtaccacaaactaagagccgtaaaacaacagaagtttattctgtcataggtctggagacagaaatctgaattcaaggcacaggcagagttagtgtcttctgcaggttctcggggagaaaccatcccacacctctccagcttctggtggctcccagcaatccttggtgctctttggctctcagctgcatccctctggtctctgcctccttggtcatgtggctttcttcctatgtgtcactgcatctccaatctccttcttcttataaggacaccagtcattggatttagggcccactcggatccagcataaaaaaaaagtttaaaaaaattatttggaaataattatagattcacagaaagtagcaaagacaggatataaagcacagaggtctgatgtgtcctgcacccagtttctcctgttggttacttcttacgtaattacagtacgatattaaaaccaagaatttgacattgataaaataagtgtgtacagttctatgtcattttatcacatgtctagatgcctgcaactaccactgcaatcaagatacagatttatcccatgatcacaaagatctccctttatagtttcgcctactcttctttctccaccaccctaacccctggcaaccagaatctgttctctatccctataattttgtcacttcaacaatgttacataaaaggaatcacatggtatgtgaccctttcagattggcttttttcactcagtagaaagtccttcagaatcactccagttctctgtatcaacacttcgttcctttttattgcctcatagcattctatggcatggatatattacaatttgttaggctagttgcctattgagggatgggttggctctttctagctttggctacaacaaataaagctgctgtgaacaatcatgtatgggttctgtgtggacataagtttttatttcctgggggtaaattcccaaggagtacaattcctgggtcatatggtaggtgtcttttgtttagtttttcaagaaactgacaactattttctagagtagctatacccttttatattcccaccagcaatatatgaatgatccattttcaccgcatcctcacaaacatttcagtatgacctaattttgacttgattacctctgcaaagaccctatttccaaataaagtcacatttatgtgacccatttatgagtaccaagagcaaggagttgagcatacctttttgaaggacacaattccacctgcagcacctgtcttcacttgcttaggttatgggtgggtttcccttcagagtgttatcttctgagaagaaggtttgaattcatagctggattatgcctgcctttgattgttcaatttggcccccagggatgagtgagcaagttcatgtcattggaagggacattactgagtctcacccctactcaaacctccaaagtttgaaagatttgatactcatcaacattctcaagaggcagaagggcaaggtgcttccttatgtagtttctccatgactgtccttccccactttcccagtactgactggaaagaaaaacaaagcaggacaaagggattgtcagtcatttgagggaagggatgctgtgttagttactcctgaaccccttcagagtgtaggcagagagaggtacttagaaaggtgtgttggatggatgagtagctgagaggggcagggccagagtgccccatagaatgaggaagagtcctcatttacatgtgcccttcccccttcccaaacatgtgagtgttcatacatgggtttccagtgtctgggcaaggttaattctgtcctctgtccccttgctgaaggtctgtttcatttaatttctatgtatgtgtgctcctagctagccaaacagggcacagatgccaggaaaatagcaggcctgttgttttgttgagcaccttgagccctggaaggcagactcattcagggctcaagagggcaggattaggcaggtagctatttgatcccaggcccccccacttaccagctgcgtggtcttgacctattacttattcctcttctatctattaactgggtataagatgttctttatgtgaagttattttgaagcataatgtgtatacagaacagtgcacagatcataactgcacaaccccacacgaggaacagaacattaccaagaccccagaagccccttcttgtcttctcccaggcactaactcgcccacccccagctaagagtaatttccatccaaatttctaactttatttttacctggttttgaactttatatggatgaaaacatacagaacatatcttttgcattgagtttctcttatgtaacattatttttatgagattcatctgtgtgagtaggtatagttgtagcttgttaattctcctcattgggtattctaatgtataaacataccacagtttaataactcattctattgttggacaatcgggctatttccaatttttggcttttgtaaataaagctgctttgaacattcttgcatagttttttggtgggtggggacactcagtcatctagaagtgggattgctgagttatagaatatatttgtctctcagctttatagaacctttgcaacattttaatgaatgtttttaatctcacagtatagtgtggattaaattaggttgtggaaagtactcaatacggcccttggcagacaggagtccctcagtacctgtttaaaaatgtaaataaggcatgacattccattaagtctaagtaccatgatgaacttaaacatttccctattgtttgtttatttaattgcttttattgtgttgttattttatatcatgttgcaatgaatgattctctttatagcaggtttcttcttttgaaaaatttgctttggttgattctcagggaattgaatcaaaggatatatgactgtaagacctgtcacccttaaaaaggactatgagggcttgctgaggaggggaaaacaaggaagcaagtctctcctaccatggcccaggggactgtgaggacagaaggcttgtgggtttgagggaggactgtcttgcagaggatgatagggtaaaatagaatgaaggatgatttttataaatggttatgcgccttaggatgactacatatttagtcccttataagagaaattgagtagttggtaaaacaacagataataattattaaatgaggaaagagagaaaccacaggtgcaaagattcactttatttattcattctcctccaacattagcataattaaagccaaggaggaggaggggggtgaggtgaaagatgagctggaggaccgcaataggggtaggtcccctgtggaaaaagggtcagaggccaaaggatgggagggggtcaggctggaactgaggagcaggtgggggcacttctccctctaacactctcccctgttgaagctctttgtgacgggcgagctcaggccctgatgggtgacttcgcaggcgtagactttgtgtttctcgtagtctgctttgctcagcgtcagggtgctgctgaggctgtaggtgctgtccttgctgtcctgctctgtgacactctcctgggagttacccgattggagggcgttatccaccttccactgtactttggcctctctgggatagaagttattcagcaggcacacaacagaggcagttccagatttcaactgctcatcagatggcgggaagatgaagacagatggtgcagccacagttcctgaggaaagaagcaaacaggatggtgtttaagtaacaaagttctgcccttgggtgtgttgtttgcggataatcacagggcatgttagggacagacagaaaacagcatgcttatcccagataattatagcaaggagaccaagaagcgtatttaaaatcttgatgttttgagtttcttcctagcttccccctattccttaataaagttctaaattgttttgttggagctctttgcagccattctgagggctttgcatgcttttctgaccttgcagtaaactcaatgctttaggcaaagaatggccacgtcatccgaccccctcagagtttagaattcagaacaggtctgaagaagaccaggcagcggctgagtcaaggaaagcctccgtccgcttttatttcccctgtgcctcttccaggactgtgctgggataacaggctcccgggggttactttggctgggctgggctaaaacctccctgcagagcaggccctgagccctgcctctgcgcctgggtggtgtcagcccctccaccttctgactgttccagcaactctctaagccctcccaaaggcctcaaggcctgtaaccatatgcagcaattttcagccataccaggagaggtcaactgtaatcttggccacctgcctaagaggaagtggctagcttcacttctgaccctcagcaactgccaggtggcctcttggaaatccccctctgggggattccacccgttgggtgggagagcagtagttaaaatgtaaaataagaatcttttgctgggagaagtcaacagatagggagaagtcagctgataacagaaatagttttttttttttttaaaactaacttcactgttaaccaagcagttcaacatgaaagactgaatctcttatgtttaatattttcttctcttttaatcttcataactaatttttttcagataattgtataaaataaccatggtagcaaaataatgtgatcactggaaaataagcagggaaaaacatgctatgaagatactcctatctgggtgaattcttgatagctttacatttttcatctggcatttaaacattaaacagttaatgtatttgacatgaaaattatttcaagttatcttattagttttaatagagtttaaaaagtgtttaaaagagttttcaaaaggctctaaaatcattttgaaatagtttaaaacagttttgaatcgttgtaagttagttttaatagagctttaaaaaggccctaaaatagtcctatcaagttgttgcagaccaaaataatctccttaaatatcacttttgagatcagctggggtaaacgacagcaacacaatgacaaatcattaaactattttagagattatgaaattaaaatactcagattaaaattttcctatcacagaattaaggtactggaaaatatgtttaagtttttattaatcacattgctataggtttagatattttgtacaactgaaataaaatcacacactggcagctacatttttgaaagttaaaaacatggtcacgaatatatcttattttaaaatcagttaatataccttaatggtatttaatgccaaattcaaagtgaattgatcaagccctcagtggccaggtcatgggtgtgatttttactctgaaagaattacatatttctttctttttggttgagcttttgttatttaaatacatttgatgagaggatattgaaataattaaatagcactgaaaaaaaaaaaagctttaaattatttacaatcccctaatggaaattttcactaatgagatatcataatgaatgtgaattttatttctgaaatctctaataaatcagtcttctccctggttttcccagctcagcgcccattacgtttctgttctctttcccttagtggcattatttgtatcactgtgcatcaggaaagctggctacggcagcatcaatcgggcagacacagggtggccacggccactagcggcaaggcggctgccccaagagcgcggtggcatggccaccaaagccactcaatcgagaaagaccgcggctctgtctacagctcgcggtgccacggccttcttggcagaataaaaatgtagacaagtaataacagaggataatgaaagaacatactctttaaaatatttcctatttttttcacagacccacggtcattaaaaaatgcaattatttactttttttcatttaaacacatttctttgagattgagcttttgggaataaccacctttccaccattacaataagagataatttcacgtttagtctaatgtacaaattggatttttaaaaaatgagctctatctgtgaagcccttattcctatagaatgtgtctttttgagtttattacttattacagactctaaaaacaacattgctgctgattttcaagtaagctgcctcttctacatagcaaataggtacacttcacttttccctgatttttcttagggcgtgctattgatttttattgttgtctgacaaaataatttatcaaacaaaagggagaaagactaaaaaatgtatttttccacttttctgtatcatgcataatcagcaacaaccaatacaatatttggcaagagtgaacaaaaataaatttacttttgctccttagaaatacaagggttcctttttagttacactttttttttttactttgtgtcattcagtttagagcaatttaatctttttttctccaaatccatttttgaagctgagtttaacttttgcaacccatggcaaatcttaaatgccctcatttaccaatctttaccaaactcctatttaagcctctaaaagtcaatactggccatcagacccaaatttcagaagacaatagtgaaaaattacttacgtttaatctccagtcgtgtcccttggccgaaggtgatccacagtgttaacttaattactttccccttaacaaaaatctcttttcgctgttaatatcactaacctgaccgatgcagagaaaatcttgcaattgagatgcctcacttaactggctagcgcttggctgttccttaagatgaactaattttctatcccttactcatctgactttttgaaagaatctggtactctttggaattgacctgagctaatatctcaaacacaaaaacgctccaaatttaaaaccttataagaaaaagcattaggaaagtgcacttacgtttgatctccaccttggtccctccgccgaaagtgagccacagtgagggatctcaccctttcccctcaacaaaaacctctcttgaagccaatcatatgagataggctgcttgttcagagaaaaatctagctatttcttccccatttcccccatgaatcctattctcctctcaaacccaatgattcgtctatttgctcagctttttaagttcattttctggtgtcctgctatttacttctgggtcaccaggtttattcaaccaaaatatcacaaaacttgcacaaatgatacaatggcactaaaatctcacgaataattgagacagatgtacttacgtttgatatccactttggtcccagggccgaaagtgaatcacagtgattcgtcttaacttttccctttacaaaaacctccctgaaagctcagcaagcctctttcccccaatgaagttattttgatttagaaatcttaaaaattagccacaagctagcgtcctgtggaacaatttcccctcctctgtacctaacctgggaatgaagtttgttagatccctggcatccgactaatgaaaatccacacaaaggaacacaaagtaaactaattagcaacagtgaagaatcagtggaaaaaagtacttacgtttgatctccagcttggtcccctggccaaaactgcacacacaatggttcctcttaacttccctcctatacaaaaactccctttctgacaattgaccaaggctctgtccagaacatgttatgttccccaggacatttctgaagctattacttagacaagttattctcacccaatgactgaatcttgcttgctcttcaaagaaaatgtgcaatcaattctcgagtttgactacagacttatctttatcttttccctgaaggatatcagaggctgattgcagagtcaccttatagatcacttcatagacacagggaacagaagacacagacaactgaggaagcaaagtttaaattctactcacgtttgatttccaccttggtcccttggccgaacgtccaccacagtgagagctctccattgtcttgctgaacaaaaacccttctcaccaaaggggaacagagtcctgggtcagctgctgaagctcaactcccttttcgagcaggtgtggaaaccctgaggcttctctgacatagcatgtgtttattttcttaggtgagacctaaaatccaagaagagaatatatttacgtctatggcctgatggttcctttctttagcaacttgccacatctggactgcttattatttatttattttttagaaagtagactgaatgttaattacaaagaaaaacaagcaattaaaaaaaatggccagtttttttgtactttcttttggggtgggctgggggggcttttgcaaaggataaacttcatttagtgtaattatggaaatcatcagcttctcaatgagtaataattacaggttgtcttactattttatcttctcctttgctgcaatgttatttaaaaaaaggtagactaaatatatatcaacttaaggctcataactttgaaatgcattttgaaatgtagctccagatggtatacgaaaccaaagtgaagactaatagagtagaaaagtagactttacttggttggtttgtctgttttcacagcacaggaagagctcagctcttactgagctggaccaggcgcatgccatctttggagctgccatggagtcccagtgttccatagtgtttccatagtaatctcatcaacaacactgaagaccttttcagtattttcttttgagtccagctccatttttgcagccttgtatctctcttaaccttccatctccaccccttccatacattactcccacctccctacactccttagagtttttctatggcctccagctttcacaagcactccctctgcttgggaacatctttgtccacctgggttagcttgtgaactgctaattgtctttcaaaattcaactgaagagagaccttctctcagattagccctgagcaggtgacctgaatttacagagtacagagacaggtcactgggcctagagtacctaattattttttattttatttatttattttttttgagacggagtctcgctctgtcgcccaggctggagtgcagtggtgcgatcttggctcactgcaagctccgcctcccgggttcacaccattctcctgcctcagcctcccgactagctgggactaaaggcgcccgccaccacgcctcgctaattttttgtatttttagtagagacggggtttcaccgtgttagccaggatggtctcgatctcctgacctcgtgatccgcccacctcggcctcccaaagtgctgggattacaggcgtgagccaccgcgcccagccgagtgcctgtttatttttacctgctttcagattctcttctacccttctaaattataagctgtttgatgttttatttgccctgtatttgggaggctccgtccagtatctttacttagcaaatgcttaacaaacattttcagaataaataaaaaaaaatacctaattgaaagtcaataatagatcagagatgctatcatagaccaaagactaatactgactgccacaacagtaacttttacaacagaaatcataactacaattctaaagattaggggtaggtttatttgattctgtcactggcagctttgctagttgccttgaatagcagaattagcatttggtctcaccagaagatgaggaaggagagggatcaagttagaggtggagagttaacattggcaagtgaaatttaatgtgcaaaatagctgaccaagggcatagtccttttttaaaggggacacaaagtgattttctctgcagacatacacgcaataccaatcataaagggtgacatttattgagcacttactaagtgccagacattgtacatggatcatcacatttaattattcccaagactctatgaactaggaactaatattatcccctactttgtaggtgcaaaaacttgagggcagagaggtcaaggaactggcttatggcagtaagtggcagagctgtgacctaaactcagatcccatgtttttaactgaactatatgcagattatactccaggagtaaagtcactcaacggaagcaacaagcgtgacagggaatgctgggatgggggaaggtaaaaggaactccttagactgggataagtgtgtacagacgtatgtataagactacacatggaaatattgtttaaagagtgaaaaataactaaaatcctcattaataggagtttggttaaactgtgctagagctttacaatgtagcacaaagcagacattaaggggaagacgtagacttctatatagttacgtggaaggtgtttgtgaaaatgcaggtcactgaagagtatgtgtggtgagatatcatgatcccatctacattgaatatatatgtatataaatacgggctgaattttaaaagacataaattgtgcttggtagttatctcctgggattgcagaggaggaacaatgacactttatgccatctcctcctactcttctgtatggtgatgtgaatatattcattttatagtttttagaaataataaaactgtactaattttgaaaaacagtaaactctgacattgcctattagcattctcgatattcctgtgcaatgcataaacataactttttaaaagatatgtacacacatgtgtgagttttctttgtcaaatacttttctataatctttaaatcaagcatgccaaaaaggtaaaagctttcctgtttcagtgtaggagatagtcgtctgcaaaggaaagagatgtaggggatagaaacaggaatgaaaaagatgactgagctgttcgagggacttatgttcctaagtgagctaattggaaatctaatatgaacagtgcaaccgaataactattgtaaagcagtatttgtaaacaataaaagatgattatcataagtaccattgttgcaaaaactattttattgatcacatgcagtggtgatctgtaggaatgattgttgtgatgtttgctgtaacataaaatgaaacatgggaagtggctgagatctttaggatgtgtgtggttcattttttgaaagcaaatgttgtctcagaagcatctgtgagactctgccaggatccaccgttctacaaaatatctgtgatggacattgataagattgatctgttgaggaaaggcaaggtgtcagtaagatagtctgagagcttcttggatttcatgtaaaagagtgctggaaatagaatttcttggggaacattccaactaactcatcactgaaggtgctttacattgaaccctcagcaaagttagattatcagaaaaaaaatataaactgctgtggaggggacaggaaggaaagtcagggagggaggggggcaaggagagaaagagcgagagagaggagagaaagagagagagagaggagagagagagcacaagtacacacttcaatgcacatctataaatcatcctgaaaactactgataaattattttagcaatgttcctcagatgtaacatttcaagaaatatcatttttgctttttatttggcataatttactagccaatttaggaagttcccctcacatcagtaacatacagtacatcacccagtatgtcagaggacacaatggcataagtttgccttttgcaaggtttgagggatggccatttccctacctgactcaggaaagtctgtagctgatatccatcttcaagtttgtggttctttctctctatatatatatttgagctcagcagtcatgctggagtccagagtaggtgattctttctgctttagcttgactcctccttaagattgtaactctctcagttttacattttttgtcagacgtaagctgacattccacaaggagaggaggaaattctgtggttcacatccagtggtgcttggaacctgattggttgtcattcttccagctagtttgtcacgagtggatatctgtcctggattcccaaggatcaaggctgccccattagccaggaagtagggagatagaggaggtcacttgagaaagagctgcttctttgccgcctccaggttgtgtctgtttcctctcatatctgaagacagatgtgctggcagaagcaaagtcctttgtccggccacgtgcaaatgcatgggacataaatatgaacagagattcttgtcccactctagaaaatgtagatgttcatcttgtttccaaggggacagtaaggctgcaggtgttttttgacttccttgagagaaagagaagatagcagcaattgtatcagggcttactatcctaggaggggttcagccaccgagatttacatattcagtgctgtggtttttgtttcattttgcaagaggaacgagcccctcaagctctgtcttagagttccctgccctccctgtctacctacttggcacccagcccctatgttctcttctcgtattaaggcatagaaatcatgggcaactactgttcaggctggctctggatgaagttgtgaaatcgatgagttggggcttagttttgcagacccccaaatgccctgataatcctggctcgaaggggtgtccagcccctccacacctgtgggtatttctcgtcaggtgggacgagagactgagaaaagaaataagacacagagacaaagtatagagaaggaacagtgggcccaagggaccgtcactcagcatacggaggacccgcgctggcaccggtctctgagttccctcagtatttattgattactattttcactacctcagcaaggggaatgcggcaggagaacagggtgatagtagggagaaggtcagcaagaaaacatgtgagcaaaggaatctgtgtcacaagtaaattcaagggaaggtactatgcctggatgtgcacgtaggccagatttatgcttctctcacccaaacatctcagtgtagtaaagaacaacagagcagcattgccgccagcatatctcgcctccagccacagagcggttttctcctatctcagaatagaacgaatgtacaatcaggttttacactgagacatgccgttcccaggggcatgcaggagacagagggcttcctcttatctcaaccgcaagaggccttcctcttttactaatcctcctcagcgcagacccttcacgggtgtcaggctgggggacggtcagatctttcccatcccgcaaggccatatctcaggctgtctcagtggggagaaaccttggacaatacccagttttcctgggcagaggtccctgcggctttccgcagtgcactgtgcccctagttaatcgagaatggagaatggcgatgacttttaccaagcatactgcctgtaaacatgttgttaacaaggcacattctgcacagccctagatcccttaaatcttgattccatacaacacatgtttctgtgagcacaaggttggggctaaagttacagattaacagcatctcaaggcaaaacaattgttcaggatacagatcaaaatggagtttcttatgtcttccttttctacatagacaaagtaacagtctgatctctcttttccctatcctggctgaggctagagctccaagtctaagaaggaggataggaggcggacaggccaatggaaacaatgaatgaacaacagatggaaacaaggaatagtgtggatttttgagttcattagcgcgtcctccactctttcaaaacctcctttgcaatgacagaagaaatataaaaatgataatgaatttatttcgtggttggagaatcatgagaggtcctattagaagaaaaaactttgaagaacaccacagagatttaaaccatgtcattgaattcatagagaaactggaatttagaaacattttttccattgcaaaaacaggaggcgtccttgaagcagccagttctagttttccccacagagccccagaaaagccgtacttcagagctatcgggctgggaatggtgataggtggacagtggagagtggaataacacctgggtcatctctctgctggttacagacagcttggccctcatgcttcaggccgtgggaatagagattgaaagaaaaagggggcaagttaataggcattcaatagtaatgggatttaaaaaaccctcccaaaccactagaaggaaaagaaatagacaaaaataataaaccaatccagcaaagtttaggaaaagtgaataaaaaattgaggtaagcacgatacataaaagtacaaattaagtttgaaggaccaagtcaaaatatacagtcacaaactattgtgaatgttaaattatttaaaactttaaataatttatctaaaaataaaaataaaccaaaaagatgactatgtatgttttcaaggatatttgattcactagagaaacagttcatttgcttcctatttatgatgattaaaaactagattgcaaaagttagatgttaatgtaaagaaaactttatgaaaatgataatggatttttatctagtagaaaagataaccccaatgcttatggttttattgctctgtaggacattaacaagttgtgcatcttatttagcaaacttattctaacattagtagatgtgagtgtgtgtgtgtgcgtgtgtgtgtgtgtacgtatacatataggtgtgtgcaggtatgtgtatatgtatgtatgtaggtatatatgtatatactagcaaatgataaagttggttcaaaggacgatgtacagtagtacctccttatccacaattttgctttctggggtttcagttacctgtaggcaactgtagtctgaaaatattaaaaagaaatttctagaaataagaatttactcattttaaattgtgtgccttagtagcgtgatgacatatcatgcccttccgctccataccagcctgggactgaatcatccctttgtccagcgtctccatgctgtctacacttaccctcctgtttagatgcttagtagccctcttggtcatcagattgactgtcatgatatcctagtgtttgtgctcaagtaactcttattttactgaattgttctattttattactagttattgttgttaacctcttactgtgactaattaatgcattttatcataggtaagtgtgtataggaaaaaacatagcatatgtagggttgtgcaatagcatccactggggggagaattttgctgaagttagaacagagaagactgtccagaagaaagaattttctatacttgccaccttttttctgtttggtgtcctcatgtaagtctcagtgttacgatctgtctccccacctcaatcactgccctctgtctctggaaggaaattccccttgggctgaggccagcatggtgccagacaggagagatccagtacccactctggaaaatttcataagataactggttctccaccttcttcagggaccttttatcatatctcatgtgcccatggcatttgtcactgccatctgcacaacactgaactccagcaacatcaactgagaagaaagagagagagagggagaaagagaaagagagagagagaaaagtcgtttgttgattgagccacacaaaattttttttctaattaaattatatatccaggtagctgcaatatgctacaatcccaaatacacatatttattaaatatgattcaaagagcattcattgagtactctgtatcaaggcacaatgtaaaataagtgcaaaattactggtgattgttacgcctttctgtgggactcgactctctctggttggaggtactgtgtgggagcacgtgagctccaatcaggtggtctggagggagcaaaatgcagctgttggaggttaaatatgaagggaaatagcagtaggcatcggatagcatagaatgaaaataaaagtgcatatacttccagtgcctgttttacagattccttgtctttttttttttttttgaagacggagtctccctctgtcgcccaggctggagtgcaatgctgtgatcttggctcactgcaacctccgccttctgggttcaagcgattctcctgcctcagcctgctgagtagctgagattacaggtgcgcaccatcacgcccggctaatttttgtatttttagtagaggcggtgtttcactatgttggtaaggctggtctcgagctcctgacctcgtgatccacctgcctcagcctcccaaagtgctgggattacaggcatgagccagtgcgcctggcctccttgttttttaaaactagttcaaaccctcaactcataatttgggaaattcaggtcataggatgccctgttatttataaggtatccagcaatgcatggaacagaatatttaacttttaaaaaacttatattaggttgttgcaaaagtaattgctgtcattttctcctttctttttctttttctttctttctttctttctttttctttctttctctttcttcttttctttctttttctttctttctctttctttcctttctttcttttctttctctttcttttctttcctttttctttcttgtctttctctttctttctctttctttttctttctttctctttctttcctttctttcttttctttctttctctttctttcctctttcttttctttcccctttctttctttctttctttcttgtctttctttctttcttctttctttctttttttctttccttcttctttccttcctttcctttccttccttcctccctctctccctcccttccttccttttccttccttccttcccttccattcccttcccttccccttccttccttccctccctccctcccttccttccttctctctctctttctttctttcttcctttctttctttctctttcctttcttctttcgttgttgtgttccagaacgatttagtgttacctacagttcccagagaaagaatcctgtcttgaggggtggctggggcagggctactactctccctgctctgtgctctagtggccaggtggatcagctccagctgccaggtcaaatttcctagggaatggaattctgtctttttaacaagaacaaaataggtgcttagtaaatataagatgccttcagcttttagtatatgcataatcataaatataaatttgtttaaaacctgaactattctgatgttctcactggctagccaaacttaaaatgtgtatttggacttgaatttcccaccaagggtgttactagcttctttactgttgcagctgccttttgttttgtttttgaaagtttaaaaaaatacacaagggggcttttgcttcctgaaagatggagtagaattacttttacctatttctctcaagtaaagtaaaaaccccggacattgtacgtaaagcaaacttatgaagactctggaagctggagagaagaaggcagaccagttaggaacattgggacccaaggagcgacccagcagtgcattccacggggtttctttttgcctcatccattccagacttggttctggagaagtttgtcaacccagaaacaccaacaggcccagaaaaacataaagccctaataaaaagctggctctctctagtcaaaggagaaagaaaggggaagcccagtaaaacaattcttaggcagtaacggctctgctccattcaaacacccaacttctccttcctgagtggcaagagaggaaattcgctgagatgagtttaaatgagatccaaagcctcataacacaatactccaaagtccagatttcaaatgaaaaccacacatcccaacaggaaccaggggaaccaggaaaatctcagctttgatgagacagttaagaggcgctaatactgacatgacagagacgttagaattacctgacaagaatgttaaagctgccatcgtaagaacacatcaaactcaacaccaccatcaatgagtaagatcataaatcaacatttctggaaaactccaaccagcaccagcagaattcgcattcttttcaagtgctcatggaacatataccaaaattgccatatactgggccatgtaacaaacctcaacaaatttaatagaactgaaatcacatgaagtgtgttctctgaccacctggaatcaaactggaaatcgataatagaaaaataatgggaaaaatgccaaacccttggaaacaaaacaacacacttctaaacaatccatgggagatttcaaggaaaataaaagattatatattgaatagaataaaactgaagatgtaacatattataatatcaaggatacagtaaaagcccaaagaaatgaaaacttatcccagaaaaatgaaaacttagcacaaaaacgtatacaatacacaactattcatagtggttttatttgtattaaaaaaaaactggaatcagtcaaaatgtcctacaatagattaatggtaaaacaaactgcggtacatccatcccatggaataattagtaataaaaagtagtgagttgggcacggtggttcatacctacaatccatacctacatacctacagcactttgtgaagtagaggtgggagaatcgcttgacctaggagtttgagaccagcgtaggcaacatagtgagaccatgtctctaaaaaaaatttaaaaaaattagctgtgtgttgtgtcccatgcctgtagtcctagctacttgggaggctgaggcaggaggaagcttgagcccaggagttcgaggctgctagagagagttatgatctcgccactgcactccaccctgtgtgacagagtgagactctgtctctaaaaaaaattaaaaaaaaaatagtgagctgttgatacacatgacttgaatggatctgaggggcattatgctgagtataaaggtcacatattgcatgattccatttacataacgtttttgtcttttcaaaaatattgcaaggggtacttggttgcagggtgtgcgcatttttcaatttacaaattggcctcaaattcgtgtattaagtttcattcccacatttgcaatgataagtcctccatggagtttcctcactctacatcctctccaatacttgatattatcaggctttttaatttttttccactcaaatggtcaatacgttgtattttatttttggtttaaaatacatatttgtgttttctgatcactcatgaggttgaccatttaaaaatgtttattggctattggggtctcatctgttgtgaattgcctgtttttaaggtatgcccacttttttattgagtttcttatttttttcactattgcataggagttttcaatctttcttccctcctcttattctttaataacagaatcccaatttttttacagggcaacagtgtcccagccaaaaatctaattcctcagcttctttgcagttaggactgttgagacatcatctgaaatctattgtgcatttctggaaaaattttgcttgatggacagaggcaccactgcttatttctcctttgtgttctatcttcttctatctggaacttggcagaagcacccatcttgcaggatgaaagtcacaagctagagtggaggagcaggcagggaaaggacctgggtcctgcagcagctgtctagctctgaaccacctgcctccagagtccgccttggtgagaaaaatgtatctctttatctgatcaagctcctctagttagatttcaactacatatagctgagtgaatactgatgaatactgaataatgaatgctggtacaactttctaatatcttctcttagagttctgcattgaagtttttaaataagtttagtctatacctttcttttccattttcagtcttcaattttgacttcaagataattctagtcctatgatgtgatttatgtttctaaataatggcatttaccctctttcactattccctggaattggaaaaaataggttatttatttatttatttatttatttatttgggtttgggtaaaacttaaccatatgtttaacaggacctggactttgatttaagcaaacttagggtaaaaacagtttaaagacaatcaaggaaattggaatagaaaatgggtattggatattagggaattactctcaattatgctgggaatcataatggaatggtggttgttttttaaaagtccttatcagttggcaacgtattaatgattggctgaaaaatactgccagtgtctgtgtgtgaggaggtgagagaacagagtaattggatgaggggggaggcggtagttgaaacaagattagcaaaatgttaatttgtgaagcttagggttcattatactatttgtgtatattcatatttctataaacactaaaaatgaaaataaagtggtctcgtgttgctgactgtgactgtcacactctgtcagcagatggcagtgttgtataaaccatgagcctacataggcctaatggatcattgtgcttgctaagtaacaaaatcaatgatacgatataaaccaggtcagattttattgcttttagacaaaagggcaaggtaagatttgcagagtaaagaacaggtacagagtaataataaattattttaaaaattctaagtgattcattaaagtcttatagacaagttgggtagaaaagtacgtaaaaaccccataaacctataaacttactagaattataaaatcatttggtctctctctctctctcaaactctccccttatttgcattttaaatcagtattttcatacatatatatttgcaaaaccttattgatttcattgatgaaaatgacttggagtttgctttaaaaccttacacgataaacataaatattattctgtagttctttttacccaacttttaactggcatagtttaatctatgaaaacagctccatattttaaaagattctctaactatgacaacaggcaacatttcatagatgataaaatgtcttatcaactaatacctaatattttaacttaggttatgtacagtagctttaagaaccagttgtagaatttgatatatagaaaataatatagaccctgtcactgggcaaacttatggtggaatcattttttgtgttgttgtggacaaattagttattctttctgaacccctgtttggatatatattttttaaagcccataatttgggcatcctcataaagtagtgacgtctgaaattaaacaatcaatgtaagagagctagtttcctttctcggcaagagaatatgactctaaaatttatgcccaagttagactatttttatcttgcctctttcccctagaatatttgggt

SEQ ID NO: 6 - DNA, 299890 bp, synthetic construct
  misc_feature 1..299890: note = D9-E24-F17 (Fig. 1b after integration)
  source 1..299890: mol_type = other DNA
ttaattaagcctgtaattttaatgcagttgaatatgtcaatcgtttattgactatgttttttataaagtttaagaaattcttctctattttgggagtcatgaagatattcttgcattccagattttcctcctgacataatttactttcttcctgaagtgcaccctttagtagtctctttagtgaaggtcagtggctagtagtcagtttgatttactagaaaatgtccttaaatttcccctgacaattattttctctccacacttccaagatatatttccactgtgttgtatattttttcatatgattctgttgtattcttgcttccattgttgccgttgaaaggtcagctgtcagttgaactcttattttgtaggaatctgtcttccttacttggctatatttagtcttcactctgtctttggcattctgcagtttgtgaaacagtgataccatgtgttgagatgtggatttttttttattactcctgcttggtattcattctatattcaatatctgaaaattccattcacttgacctcaatagcttgattctgcaatttgtcacttccattaacttccattcttgttcacttgtttcctcttatgtttagtgaattttgattggaagctcatgtctgtgggggtaactcagttctgaatgatgtattagaaactttctataccaaacaacttcactcacttttttttttttcttgagagagtctctctctgtcactcaggctggagtgcagagagaggttcaatcatggctcactgcagactccaactcctgagatcaaatgatcctcccacctcagcctcctaagtagttaggactacaggcacacactaccacacctggccaatttttgttttattttttgtagagaccaggtcttgctgtgttgcccaggctagtgttaaattcccagcctcaagaaatgttcctgccttggcctcccaaagtgctgagattacaggcattagccactgtgccctgccttcacgcccttctgtatagctcagccaaaagatatacaacttcagttctgctttccaaaatatatccctagctttctggaaccagcagttcttatcttacaactggccaatacatagacatagatatgtcaccctttcccttctgaggcttccacttgctgttgtctggctgttgtctttgaatttatggagtattcatggtctcttaaggagaaaaaagaaaagggagatgagaagccagaagagaacaggaagttgaccacaaggcagagactcctcagcaaggagcacaatcacagctttacagggccagaaaacaactccagcagcgtggctgcctcttaaagcgccagttctggaagcaaattcccccttaacaatcaatatctaagtgaattttggaagtcctaggctggtctgagactgccggagaatgagtcaaggccggcttgtcctagggagggggtggtgagggatggaagccgctgtcctctggctccccgtcaactgtgcatgtcaatcccagtgacaagggctgctgatgcttcagaaaggtaccaggcctcagctttaaggcgcttgccaagaagccatgagaagtgcattaagatgctggcacatgaacagcacccaaacaatgctggttattagtggttcaccaggtgctttacagtttataaaatacattcactcagactgcctggtttagtccacacaacaattctaactcccttggaaagaccagagaactgccatttgataccttccactgcttactgcaagctcacctgcgccaggcatggggacagcaagggaacctcagccccatcttgccagtcagtgcctgcagaggggtcccggtgcccctcttgccatcagaagcttccctggccagacacagccatatgcatgttacttacatttgcacatttaatctttgccacagtccatgagatagtctgtaccagagggaactggggcctgaggtcacacaggcagtgcgtggtgggactcaggcatggtgtaggacacttgtggttcttgccccgaaaccagatttcaaggccaagggcaaggccagatagaggctcctagaatgtgccagagggtggcctgctacagcctcagccaaggtctgcctggggcattaggggccttgatggggatatcacgcctgcagtctcagggagcccatcagcggcctcctctctctggattccagctatggcttagggatccctgtcctacctttcacaacaggccaggggcctctgagtatttgggaatctgctcaaacattgtgggaaccttcctgcaatggcttcagtgttgcagaatcaatgttctgccaaagaaagtcactcacttcttatttctacacccctctacctcctaaacagtaggagggaccagagccaagggctgcaggtggctttacacccagtagacttagtgatctcatttctgtctccagtagtctaggttggatttcttatagttgtgaaaactttgagtatttgtttttactttttcttaaagctcgtatggtggccccaaactgctttcccattttaatgcttatttttgtatctcatcagagctggagatatttttcaatggttgaggctggccctcaaagtggagaaatatttgattacagtgagccatttacagcaagtagatttcaagcacaacactggcaaaatccttttctataagaaacactgtcttatatagattttccaaaaggctgaactgaaactggaaaggatgtcttaaggaaagatggatattaacaataggtttttaaaacctattcttctctagaacatggagaagagctccttcatgtttagaaagttggttaagaactagaatataagaactggggtaacaacacccagattcagcttccaatctggaatctggaagtccaggaagaaagggctggtgccaggtttggagagggaggttgaacctggatgttaccacaccagatagagagaaaacttccaaaggctcctcaggtccagtcaaaaggactcggcaggctcctgttggccaaagatgggaccgcttgggcttcttatagctacaatggattggaatgcaccaactaaggtgaaatccacgagttcaaaatgatacttaaaacaaaaacttctttggtcactcttggaggatgcttattattttgaaactgctttaaaagaaaaagaagccggcaaaaaatgtgttgtgggggcaaagagcttctgaaatacgcacatacctgagcactaccctctgggcagcactccaagtcctgctactcctagaaccctttggggacttcaagaaagccccagggtctgcgtcctgccccagagagtctgcttgaacaggtaagggaggctgcattgttgagagttccccaggcagggtggccagggctgagaaagcctgaggccagctctctgcttctactctcacctccagtccatgcaccatgcagcgccattcctcctgggtttgaatcccagctctgcctggtgggtaggtcatttagcttgtctgtgcctctgtgtgcctgtctatcaaatagaagaggtgggggtctcactggcccctctatcatctggcccttgtgagggtttgatgagtctgtctggcacatggtgaatgttggctgtagtagccataaccatttggaatggcacagagggcaggaagagacgttccatgagaaagatacaggggagggaatgtctaagagaggcctctctaaaggatgggaaattcacttttggaaaggagagatgggagatcaatcagctgggtgggcgagataacatttagagggcacagacccttcttatgagttgatgatggctttggttaccaagaaaaatgtacctatacacacacacaacttttgcctacaaatctaaggactcacagaccccccaatgtccgtctgcaaccccaacagttgaagtccattgccacctccaggttaaataactgtcatcaacgactctattattttgacaatattgatcaaaacattaaatgcccatactcttcaactaaataatttcacttgatggaatttgtcctacaaatgatgcatgtgaggaaaataacaactataaaagttgtttattgcagcctgttgattacagaaaagctaggaaatgatctcttcatccacaggggaccagttaaatcaattgtatctacagagtgaaacactctgcaatcttcaaaaaaaaaaaaaaaaaaaaagagaaaattctatatcccaaaatggaacaagaacaatctccaataatttgtaaaggcacagaccagtgtactcagtgtgctatgatttgtgcagaaaaataagaaaatgcatgtgtgagtgtctgtgtatatgtgcatttgttgaaggtgaacagaatatttccagaatgagaccctatcagccagtcagtgccttggtctcggggaagcagaacctcttgtcttggagacagttttgaatgtaggaccatattcatgtttacattaatccaaaacaaataacaggtacatttaaaaagaaaagaaagccacgtgggcattggaggctcacagagaattctgaatgggaagagataaggaggatggcctttggggagagtggatctgctcacctgaacagagcatctggaagcccctcatgggtgggagaggggctgctgcaggggccgggatcacacgctgaggttctgagacagttgctgcctgagtaatgacgccctgggaaccgtgaaggatatgtcaaaaagatgcatggtctcaggtctgtgtggccagggctccaggccatggctgggaggtgtgggtttggggtggggcagacaagttgctgagaagcaaagaggtgtgccaggggtgggtacccggtggcaggtttttctgcatagctgggcattgcttcagcatggcaggtttcatgtactgccaaccccaaattccttttcttactgctcgtcttaattttcatgacagctttgcctctccttctcttccctggcgcttaggtgaccacaggcttcataaagcctaaaaaacttcagactgagaggaaaagaccccagtcaagatgggtgcggctgttgtcatcagcacacaggtgagccggggtctcctggtcccaccacgggccaggcagtaatgggctctgtaaaggacacacaagggcgttgcccacggcgggaacctggatgtcccaaaggctccctctgccattgtgatgtttcaggatgaaggaaacgattgtccttctcattcaggtgtgcagagtgcacgttgtttaagtccaggctctcttgtctactatatacctctctctctttttaaaaattgtggttaaacatatataacaaaatcaaccatcttaaccatttttcagtatacagttgagtggcattcgtgttcattcacactgttgtgcacccgtcaccaccatccatctccagagtgctttccatcttgcagatctgaaactctgcacccattaaacaacaactccccactcttccctccccgcagtccctggcaaccaccattctactttctgtctacactgggtacctgatatgaatggaatcatgccgtatttgtccttttgtgactgccttttctcgcttagcataatgtcctcaaagttcatctgtgttgtagcatgtgtcagaatttccttctttttcaagtgctgaataatattccattgcatatgtgtgtcacagttggtttatccactcatctgcttatacacactagcgttgcttccaccttttggctattgtgaataatgctgctatgaacacgggtgtccaattagctcttggatgcacactcccgaaaaagaaaaaacagctgggtgcagtggctcacacctgtaatcccagaactctgggaggccaaggtggggatcacttgagcccaagggttcaaaagcagcctgggcaacatggcaaaaccctgtctctaaaaaaatacaaacattacccagacatggtggcacatgcctgtagtccccactactcgggaggctgagatgggaggaccacttgagcccgggaggcagacagccttgattttgccactgcacttcagcatgggtgacagagagagaccctgtctcaaaaaaaagggaaaaaacaagacaaggtttctcctggggctgtgcttcagaccccattaggcagttgctctgcaaaatgcctcatgagtcacagctctgtcaaacagatgtgcacatgttcctaccactgtagcatcccttgggggtttggttctgttcacccaaaatgagtgggagtttggttctgaacacgcagcactaaggggacctcaaaaaggacaccttatagtacgagaactcaaaaaggaaggcagagtgtcaccttgcttgacctcagctgggaatgtgtgttcatgtctggcaactcaagtttttcgctgctctgagcatgtcaatggctgtgaaagtgccaagtgtattaatttgggggttacaaatacatcttagcaagtaggtgaacttgcaaatacagaatccaggagttatgagggtccactgtattttcagtgtcgaaattatcttccatcaagttgataaaacctcatttactcaattaggccctagtcagggtatgtgaagtgttctagctttttcctattacaaatgatgctgcagtgaataccttgctgcaaagagagttctctcattataaactgtttctgtggcgtgagttccccaactgggctctcaccagtaaggggatgtcgctgcccatgccattaggctcaccacattccctactagggacacatatttggctttgtcctggtcaacgagacagagggaaagtctacctggtgcctaagaagggggtacagggcacaatggtccctttcttgctctggccattactgtgcagtggtgaacctggagctgtgaaatggaggaggagaaagaggaaaggagcctgcatcccagatgacacgaccgagctgctgacccagatcgcaggacacgagatagtgcatttcccttctgttaaggtcagtcccagccagcgacagcccctccacagcactgctgaggagcccctggtcacccatacccctcaccctctcttcagacactccactgccccccacgactcccaggccaaactcaggacacccaccctctgccattatgccgggctccccaagcctccaccacttcccccagtcctgggactggcaaactatgagtgagactcattcacagattgtgacttcatttagtggattatcaaccagcattaagaactgaagccaactgggcataatggctcacacttgtaatcccagcactttgggaagctgaggtaggaggattgcttgaggctaggcatttgaggccagcctaggcaacaaaatgagatcctgtccctagaaaacatttcaaaaaattaacagcatggtgacgcacacttgtagccctagctacttgggaggctgagtgggaggatcctttgagcccaggagttcgaggcagcagtgaactatacttgtcagcctgggtgacagggcaagactctttgtctctaaaaacaaaacaaaacaaaaagaacttaagcagactaggatataaagtataggagcgtattgtgtacaggaacgggaaatactgtttcctggatcttttgtttcacttacgcacacacccacacccgccagtagtgtaccaggttgcgatggaaatctctctctttctgtggatgagtttgtggaagcccttgctccagcatgccctccttcctgcccacccctggaccattccttcccttcacagcactgtcccatgggtaggccacagcccagcacaggccccagcctggcggctgcagcaggagccccatcccagggcctgaggggccatgcgggggtctgggtgggagtgggaaccgctgaggaaggtgaagggaaatatggtgagatgacaggcccgctgtcagggagagtgggaggagccctggagtgccctacctctgtggggctggaactccctgtatccgagctagggtcttccacacgcatgctcctaccccaagtgccacagctggaggtcagggacccagccaggctgtgctgggtgctcctgggcagggctcacctgactgcaagtctccctgtgggtggctcagagacccagagcccacctgggtgctgcttacagcccataaggcagctcccacccgcgtgtcactggccctgcagcctcatgaagccttgtgagcagccatccttatctcctttgtgctttgaatacaggaggatgctggctctaaaaggcagaggggcatcctcagttacccagcaggggcgtggcaggcctgtctccagtaccccaagaggaccctgaaaacaagtagcattgcatgaaagttccacactctgcagttcaacctagcacacttacaaaccctgagtcactgcatcctggctcatggagggagaatttcctttttctgtggctttaaggctagcaggaaattgccagcccaggcccctaaggcctccagtgagggccgggtctcatctcccactggataacagtgttgtcgggaacttccatccagcactggcggacactcccgtcgcagctgctcctgactgagcaagtcatttaagggggtccttggcactcataagcactcacagaatggggctggcagtgcgcccggcctccctgggatgggtccagaatggtaggaagcgcagtccgggagggaccctgagttagggccaggcatccccattcctgcttcctcctccccgaggaccacgtctgcccattcctcttttattttcttttggtatatatatatatatatgtatatataatttttcacaccattataattcctctttttaaaaaaatatatatgtatgtataactttcttagtaatttctgtagttaccgaatctggaaggaaaactaagaggccaccaggcaggccgtgtgatggaaggagtgaggggagaaggagcatccatgcagagggaacagcatgtgcaaagatgagggtcagtgaggacgtggtttgtacaggtaaattcgaggagctttgagggctgacaggtaatgctggctctggggaggtgttgggagaagagaagggaagggaggagccgtgtaatgaaaagctgtgctcaccatcactaaggactctggacttaacctgacagtgggggttttaggcagtggagtggcatgatcaaagccattgctggatgcagggaggaggctgggatgaatgaggcagagtttgggctggggcatccgttatgagtctatagaaatggttcagggaggggtctcagcttattgtaaggctttctttaaagttgatggaatgttttcttcccagtttcaaggcacagcaactgtcggttgtgagagatgcttctgctaccacttctattgctcacggcaaggcaaaatgtcagtctagattcaaggaggtggagaaatagattccacttcctgatgagagaagaatgaatgcagagtttgcaactcgtctgttaaagggaatgacaaagatgcaagaagagttaaactaaagttcattcagctggcagtatccaatccagtggtgggtggcagcagtgccaggaatagcattcaggcagcagcattaatagtgacattttttgtttttcagaatgttttagggtagaaccttggccatatttccagcttaccagtttcccttgttttcacctattttctgagcctgatttttcagacttcccattcactttggagttgcatgatatccttttaataaatgccctttctgcttaatttagccagaggctgcttctgttgtttgcctctaagggtgctgactgattctttggtcaataagataatcaccaaggactgtacagtaaaataaacaagataatttactaaagaggaaatgcaggtgggtaataactcctgagaaatgtctcacctcacttacgataaaaacaaaacacatctgaattaaaacagtaacaaccagatgcttttttgtttttgcctttacaatttgcaaattcatctaatcacagctgcagagggtatggtgagacaagctttcttctactgctagtgggagagtaaactgacctaaccttttttcctgtagatttcttggctatatgtactaagatcttaaaatgagttatcctttgtcacttccaggaatttagtctaagcaaatacttagaagtatggaaagaaatttatgcacgaaggtgttcatattttagtaaaaattggaaacttgaatgaaatgaggcaattaagatgtgatataataagataataagcagaagcaaccctttcttagaaaggtttgtaaagaactgaggattggccaggcatggtggctcgcacctgtaatcccagcactttgggaggccaaggcaggcagatcacaaggtcaggagttcaagaccagcttgaccaacatggtgaaaccctgtctctactaaaaatacaaaaagtagccaggtgcggtggcaggtgcctgtaatcccagctaccgggaggctgaggcaggagaattacttgaacccgggaggtggaggttgcagtgagccgagatcatgccactgcactccagcctgggtgacagagcaagactccatctcagaagaaaaaaaaaaaagaaagagctgacaattataggaaaaccttaatggaataatattgagtggtacattgttaaataataaattaaccaaaaattatacatgtgacatttgtcgttcatgatccagtggggaaaataaactaccctggacattttaaacaaagggaatttattgtgggaaatgcttcacaggtgatgaacagcagagacccaatcatcatggaagcagcccagagatgagtcacagcaggaagccactccaccatcagggctgcagaaagtggcattgggagagggcagaggatgggcacttggtggcagctagaatcatggaggagatgcagctactgatgcaaaactgcttcctgaaggagagagatggtcaagtaccctgccttatcccttcttttcactaccctgtctcttgctggtgtctcccaccggccatatccagctggaagccaattgccaatggaaccatggacaggaaatggatctgagtagatggacaatgaccaccacacagcatgatctcgactagataaacatgatgcatgttaaatggtattacttctgctgacagggcgatatatggcttttagtttcctatgtttttctgtattttctaaagaaactgaacaatattattaaaattaaataagtggaaagtgtgtttgtggcagatacaataacgtttttaaaaagataatgtgtacgtagggaaagatgggatgttgttaaacaacagacttttatatgctgtgtctccccgtgctccctccagctttagtcagtggccctaaaagggctagtgtcctggctgcatggggccagcagggggcgatccagtctagcacaaggccttccttgaccggcggactgtggctgggatttccttgcatttcagagcaggaccctagggcaggtgtcatcctgtcagctagctcctgcccccaagaggtttgtctctgtcagcctctaactcagagctgacccttcctcccatttcaggcaggctcttaccaggactcatgagaaagccaagccaagcaccactggcactcgagggtccttccttgtccctttgggtgattggcacggttgtccactgagcccagagcctcactgtgctcattaggtgtagcctaagggcacttgcatggaggtgccagtggtcactgcttagagctctcagccctagatggcgtatcacagttaatgctctataaaacccatcatggcttttccctagtaagcctcaaatcgctgcaagcaaggcttcatatatgagagtttctgctgtctcctggagccatctcacccaaagccactgactctgggagaccagcccaggccacaaaccagcaaagcaccagttatagttagagctgcattataaagtggccagaggacatttctttgcagtgagatgtgtatcgtgaacgtttggggcctgtgctcgcctagtcctcatctttgcttttctaggtacacaaagccatcccatggctgcaaatgttagctgggctgggctccctacttgcctcaagccccttcatagacccttcaggcacatgcttttctctggacgtttacagacaggtcctcagaggtcagagcaggttgtcctagggagcagggaggcttcctagggaggtcagactccaaatagtggatatggcaaaaatgcagctgcagactcatgaggagtcgccctgggctgccactagggctcccacagtgtgcgctgccaacctgctgcccgtgcagaaactctagggtaagagctggctcctggagtcccacccaggctgcgtgtccctcacagtctgctctgtgtctatgtgtgtgtgttggggggatattattggacaattcaagggaggctcagtgaggaggaaggaaaatttcatgtaattctttctggtttgtctttctcaaccccctcctcctgcctactccttaactgagagagtgtactattatttgtgtgaccctttttttcctccaatacacatagaaggttgtataattatgcttttctgttttggaaaatgacttaaaatcatgtaaagaaaaagcttacttaggtgaaatgtagataaagagattgtgtcagcaaaatataattcttaagggtaacaagggccatggacgcaattttaattgtgaaaaataagcaggatttcatcaaagtaaactactgcaggtgagaaaagttgaactgctgtaaataagcattatcctgggctgataatgcttacaaatgttgatcctgaaaattcttcaggtacctttcagagctgagagttgtgctctctggggtgacactcaaaggaaattgggtccttttttaagcataatcttcttgggtttttagtacattcttattttttattgaaatatacaatgaaaattcatcataatacactcttactcctaaaagagattgctgtatcataggacatgtgtgcatatgaaattttatatttatgttgaaaagttttgaggagaaaagaagaatcctttctctaagtaactttatagattttgtttttaattgcacgcatacaacaagttctcattaattataaattcagttcgtgggcaaaatatattttctgtgtgcccctttctataggaaacttgctggattatttctaattctgagtctgtatctgagtaataatgacaataagtaaatgatcccaaatatatttatataagtaagagattgcattctagaacttattttttgaataattttctataattaaaatgacaaacacttttgcaatctgaatttcatagtaaggataattctaaacaaattttgaaagttttggttttagaagaagttcaagaactatttggctctgcacggagagcttacacaagttgtatctctaagccctagcttcttgctatgcctttattaacataccagttttggggttaaaaacctactttagagctaaaatattttattaaaaatttaaaaaacctactttagagataaatattttattaaaaatttatcagcctgggggatatggagtggtagagagaattacttcccatggctgctcccttgcactgtttgaatattttaccaaatgcatgcattgcctttccaaaagaaatggaaatattttcaataatcaaatcagtaaaatttctgatgcttttcagttttttatacctacttttgcctttttgaatattctcaagaatggaactagacaaatgtaagtgataaattagagagaagtgactttaacttaaacatgcatctgtgcccagacatacccttgttaatttattaatattttagacaattgtcagaatctaaagtatttccagttctcaatctagaatggctaagcttatttttatggttctacatgccacttgacaataaaagatcatttatgattctaagaagcatttgtctctcaagtggcattgtaaatcagtacaatcttttgaaaaggaatttagtaacacatttcaaaggccatgaaaattccactccctgtaagtgaatgatttcagtaaatttaaaagtcaaacattagaaggcatgccatgttgcctttcacaaaaataattctgctaccatccctggaagctgttgttagaaggtcatgttcaataagcttacaatgttttcctgattgttgtttgtgtgaccattaaaatttcaccagtattggggaatttttacctttcagatcatttagttccaactgttaggaagcaattagctcttatgttcttctggttcgtgaaagtattttactttgggtgcaggagtagggtctctggggccatggaatgatccacacaggccctggcatgggagggactggttccatctcaatctgaaaatcagacaaaggtttatttcttacttctgttatgcaatgttggcaggttgttctgactcttttccagttcctgaatattacttgttgtataataaaaatgatattctaactaaaaattttaaagaaaaaaatttgcaatcttgcagtttaatgcaaccatagtcttagcatttttgtctgtgttctcttttcaatctttgtttataaacatatatgtttctacatagagctgattgtaagaggtatagaattccacactttataaatgccttgttaatttattgttttccatgttgtcacatagacttcaggggtctcctctcaactgactgcaaattactcactgagttggtgccccattatgtcctcggtcatttcccctatcgttgagcatttacaacttttctaatgattgacttttaaatttcttgaaattattgagttaaagggagcagaattttaacaacttttgttatgtgtcactaaatcccttttcaaaagattgtactgatttacaatgccaattaaatgttttacaagtattattttccaactatgtgaggattatttttgtttatttccatatatctctatctctcctctccaaccagccaaaaaataaaaataaaaataaaaataaaagtactcaagggtgagttaggatatagacatacatatatgcttatgtgtttacatttaggtgacactatagaaggatccgcggaattctacagatattctctcactgagagacaagaataactgacttatccaggctgcaagtctggtgcttgttctatttgatagtctgatgctgtaagttttttgtcacaaactctgaagagtaaagtggaaactttgactttttgcttctgattgcagatttctatccaaagagggagttgagggaaatgcttcctgttgtcctaattacacagtactaagtgaacactggatatggagtcagaagggaaagtagacttgtgagcccatcacatatggagaaaacacttttggttcccattgttggcagggacagggaggcaggccatgttgcctttcacaaaaaaaaaaaaaaaaaaaaaaaattctgctaccatccctgggagctattgttagaaggtcatgttcaacaaactcgcaaagtgttttcttgattgttgtttgtgtcaccattactcaacgttgtgtagaatgtagtcaggtgatattatccccaattttataccgagacttattttaggtggattatatgactcagtcagaatcgcatcaaagcagaaccagaaccaagtttgttttcaactccagtgcttctttccgaagttttatttccattgtcagccacttaactattttaaaacgtatcttttggaatagggatctctcaataggaatccacagcaaagatgaagagaaaactagatcagttgccttggcaattttgtccactcagaccaggacattcagggatttctagattgaatttgtgtttccttctgactacattgttgaaatgatctggatcatctcctaatcttgctcttggactctctaggtgtattctcagtgtctgtgagggagggcatgtgttttaagcagtaaattcctaaaggcctgtggaggcccaaggccatgcacactgagggagttgtggatcaagtggcatgatgggcccagtctatttctggcagagctgttattttagctgttattctctttggccagttatctcccttagagtagtgcctctttaaatgctttttcatttggtgaaatctaaaaatttgtctctaaaaggcatgctgccaggcctcttttcatattaaagtggtcatctccacattgtagatagtaaatcatgttcaaagaaaagaccttaaaaattcttcatattgccttgcagaaatcacagtattttagatgtgttggggagcttcacaatcactcagtttaacccattcatgttacagacagggaaactgaggcctggtgactttcccagttattaacaaggtagtgactgagaagggacttcagttcgctgtttttaatgactgtatagtgagcatctgatgtttggtcttctacagaaagggaacagagttgactaaagtgaaaataccctagttcagacatcagaggcaaaaaaattaatcataatcacaacagcaccttacagttgtggagtcctttatagtttttagactcttagacacagagaaatagagaaatataaatatggaaaataaggtttatttgatattttatgaaatggaaccctaattcaccaacatttttacccctttatagtactgcaataatttgttgtgagactctgaaatcgtttctgaattatcagaggaagaaaatcatttaaaaaaggaaaccagagctactggctctatcttacttcggtcatggtcttttaaaatctattcaatttattttaactagactaattcattcttaaagtaagtcagctaacatggaattttctgaggttacttaaaaaattttggaaatttccttagctctgcatgaagtatttttatctcttcttcttcttttttttctaaagaaatagtgtttgtgggtcttgataactgcccacaacagattttatatcatctggttttgatagagcaagggggtctaatgaatgattgaaactaacatttataaaatctttcaaatttgagaggcaggttcttggaagaaggaggatacaacagaatggcctctgtgtcactggtaggactctgaagacaggacttactgcctatgttccgacatgaagaaacagactagtgaagtatgttgtcaaaactttgagaattgtaaagcaatgttcacatgtaggttgataaaaataacagaagaagttatgttaacctaggtccgaccctaggtgctgtcatgttgtcactaccttcataataagcttcaaagaggtgctctgttattatctttaaaaattacagacgaggaaactaaggtttagacagtgttagtaacttgctcagggccagtcactcaatgtgtggcagagctggattccaagtcagtgctgtctggctctaaagcttagattcttttcattgcacttttattattaaaccaaagaacttatgattaaaatattttctgctttccttgacgatttatttcaagatctaaccatttctttttcctggacattctgagcagggagcactagctctcaacttccctgcctctaccctctggctgggctgcaccttctcctgctgcctgttcctcctgcttcatcagcacacagtgggactatacattagccagggtgttagacaggccctccctggaccttgtcttactttcccccttgtgttatgaggacaagctctgtagtaactacattgagaatcttaggagcaaaggctccccacccccatgggggcacgtcagtgacatttggctcctccattttgcttaagaaacctgtgaccagaccctcaccccaggcccatagtgagaaaagcctgttttcatttcttctttcaccaagcccatctggatagagcaggtgcagggctaggctcttaaaatagaagcccttgtttcatgtgacgtggcacggtggaaactcccttgcttccttgcctgttgatcagattaatgaaatgatgaaggtctctcccctcatcgtggtgttttcttgacttcctgtcattgtcagttgacctttctagtttcttcatttgtaaaatacaggacttgttcttcataacctcaagggtccctcctatctttgataatctgtctccatgcttccgattaggggtcagattttggaatttaccatttctatcttgtttatttctcccagcaatattattccagcaggaatagctgggactaaaacttattcttggttaaagcacatcatctcaccatcttgacatcccatttgctctataccatcaaccatctctgaccctgaaccccagtctccttctttgtaatttaggaataataataccttattcatggtgtgaatcatatgagagagaggatttaacattgcttagcaagtgatacacattaggcattcagacaatgcttgttcacttggggtcaaataataaggtccattttctcttcatgacttctagctattgattagctttgaggctgaaaaataagtttaagatgggccctctgacctcaagaggctagcaatattttatcttctttttaacgctatctcctataggaaggaaagctagcaatattttggataagacaaaataaatacatatgaaacagagaatggattaagtctggaaaatccttccagtgctacacctaggacaaggtaccccatgcagagcaggtaaattcttaaaaggatggtctctgagtcaaattttggagagtgaagtgccagcatagctgatcatcctaagaaaaagtcaagaccgcaagttatgggttccaacagtggagaaaaggctaaggaaattatgcactgttagtaagatagaatgatgtgcaccattcaaaatggtcaatatgatgcataagtagaaaaaaagaagtgctgtgaaacaacagcaagtgaaagaatttgaacacaaaattctagtaatagtgtcaatggctatgtatgaagatactcagataaatgttagaaaagaatataatgtgggaaatgaaaataatagatgtgttagggttatgggtttttggatgaatttcaaaaacattccttttattaggctttcacttcttaagtcaaacattttgaaaaatttcacattgtatgacttggattgcataatataccagttcctgggctaaggttccatctttctctggggcaggatttcctctctggttttcatcgtgatctctgcctttgaatggcttgctttttcttttaagagaaaaaagtatgacaaatccagtaggtgatggaatcctctctcttccatttatatttctgtggatcttccttctcaaattgcctataacttcatattgaatctgaagaaagggagagtttctaggagccctgatataagggctcagggatttgtgctgccatttctttagaaaatgcctgattttcccaagaatgggtcagctctaatggaggtacctattccttcaaggaaaagcagtcaacttagcaaacaggtaattccagaggtgatttacgttttactttggcagatggagccttcattttcaatagaactccctgtgaacttcctttaaaagtgttttgacttttctggaacacatggactccatgcagtgacgtgcccggtaggcagtaatgcatacttagggctggccttccacagcttgagtaggtgggttccctttaaatgaaacaatctgaagagatgcaacacaactgtgacccttggtggtcttccagcttttaatctgattcaggccactcatttcaaccctatgcaagccaatttgacgcaaatgagtccaatctaaccagtccaaaaaatacttgggtgtttgtgccaataaatctaacgatcaaatcattcccccttgaattagaagttaacaagacaggatagctcatactgccctctagtcattcctgccaccattaagaagcctggggctctttcttaccccatgtgccaacttctcagggcctccttgtctaattttgcttgagaatgtagagtagaggaaggagaaatggacagacagcctagagaagtgacttacagtctgggttcagctctaactactaatagtgttgaggacgtcagtcagcttctcgaagtctcagtctccatatttgttaaaataaagagggtagtctggtttttctggccccttctctcctgtcctcctagactatgaattcatttttagctttttaatgcaaatttttgattcattagaatctagcttcttcactctgccacttttagttggctcttcttagagcattagtgcccaatttgcactgttagaattttcccttgtttgtacccttcaaaatttttctttttttgggcaaggattgtatttttttctttttaactggctccttgaggatagatgttgtgatatctgtgtgcttgtatgtcctcaactgtgccctgcactgttagggcccttgtcaaaacaacacatttctcagtgattctgagactctttctcttatctatagaagtcataactcaagagtaaaatcataccaatattttacataaaccctagaatttttatagatctattatttctttttagagtacatattggaagtaacttcacaaggaacattttctttacttttttttttggaaaaaagatttatgcttataaccaaatgaggttgtttggcaaatttgtctggagagacacacacactcagggcaaataggcactcctttcctgggcaactcaattacctcttgcctctggtcaaaccactccacaaataaagtggactgatcctcttgactctatgtgtaagtgcccattgtgtgtgcacagagctggtgagaacggccatggtgctaggtgggggtggtgttggtggagttggactagattatctgggatcatgcgaaatggaaattcatttctagctggctggcttcagaaggtgccatctcctatttttatatgaagcgtgctttggaactcagggcaacgaagggtgggtgtgctgcacaaggacagcagaagagtgagctgactggtccctgaaatcgcagttggaaagtggattaccagtgcagtagaactcttcacggaggcctggaccatcaggtctaatggtgttgttccaggtgggtggtcatgtggagcaaaaatatttgaaatcagcgagcacgtacctgagagatgacttttccacttgggctagtctcttgatatttctggtcctgtttcttcatctgtaaactgggttagtaatgtcacactctgtgagttggtgcatccagataacaaacaaacaaacccacacacagaaaaacaatccccataaatgccctataaacttatattaatcatcaacaattcatttatttgttcactcacttatttattcaacaaatactcgtatgaccaaagcactgtgctttgtgctaagctctacaataaatatagaattgtataaagatcaaggagtaaaaatcctagttcaggtcctcaataaatgataggtgaatcatagactgaaacgtggaagtaaagtaaggaggtcttccacgactattgtgatcttcaaatgttcttttgggtgcagagtttccccgggaaactgccagtttctataatggacaaaagactttgcttttcaggagtatatattttgataggaaataaagatagaaatacttggaacttagacaaattaaatacataaatgatggatagtatgtagggaatacagtactgtggggaatcaaagagagggtgaattctgggtgaaatcaggagggtttctcattattcacagatgatctcttacaggaggtgggaatttttaggtcagctggaaatggaaccaggctttcatgttcagatatacttgcagataaacaactcataagaattataagactaacagcttcgttagtttacatttgacaatttatttgtgcctcattattttgggatgtgtcaagaatctgataacatgggtgataatgctatttgccactgtaatatcaggtagtcctagtgaaaatgcaacttttaagaacttgtttaattgtatctaccaactcttactgcagaatgtagacttgaaagaagcacattcctttttcttacataatcattaggggttactacatttctgagcaacaaggctcaagagtttccaatggaaatgtaatttcaattagaaaaccaaattgaggttgagggtggagagagccagctgcagaaggtatctggacagcagcatgtatctgcaggcctgcgtgtgtgccagggtgggggcaaggaggggtagattgtgtcattttccacatatgtttatttagcttctcctgtttcagggactttgggttttattaatagtcaatttaggatattgtgcctccatcctcaagcattgtcaatcttaaaaggatgggtgggagtggtaggcattaagcctcagaatcttctagccctttggctggagtggttctgtctgctattgctgcaacctgaggaaatctttcaaattctgggtgggctgctctggttaatatagtggagactctaacaaaaattatgtcatccagcaatagagctctggtgcagtgagtggcagactaactgatgaacatctcaatgcacagcaattctcagcagccctcagccagggcactcctagggagggcctctggttacaatgctcttcagagcctgcccagtctgtctctgtttctctgtcttttctttcctttctcattattcccatcactattattgtttctctttctctaaggtctgtatattatcctttcccctagttctttgaaaaatttacttcagttgcacacacaatagaattaaatgataaacatcaattttctaaataaaatgctgtgtacacccacactcacacccacagagtattttctatttcttaacaacaacaagaaaaacaacaaaatgcatagtaagaattaaaaaatctggaggaatattgaaggccagggcagattatttgtttagattagtgatccttaacccagaatttcctcacatctagattattgtctggtggatgacaaaggaaaatatatattggaaacccagttgtggatccttgagaatacagtagaaagaacagtgaaaattgaaagggaaaaggtgagaaaaccttcttattcatgtccaggaacagaattgggcttgaatttggtggctgcagctctgaacggactcaaagtgagtgtctgtaaatcctgctcagcaacacgaggacaggggttgccatgtcctcctcttccttatgtaccttccctcatctgcctccctatctctagcacatggaccaggggctcataaatgtctgtaggatggaaaaatctaggaatacatgtggggtcagaagttgtaagagattgggttgaatatattctgattccccaagttgtttttgtctacttattttctttttcttctctgtgatggttctttttttcttgttatttgtatctttgcacaatgaaagacaaaaaaaaaaatagttctagtcactagaggacttcagtaaacatgctatcacttacctgcttatgaaccaagaggttgggaaggcaggtctcagttggcatgtagcccgagaagagtttgtcacatcttagagtctagaacctcctttcccacagagatacaaaacacacagttaactcactggtattttggctgggaagatagctgaatgatagcaccactttaaatcatatagtgatgactgctgctgatgatgcacatttcttttcagtatgaaatattagttttttgggaaatccaatgttcaccctaatcttgcagcattttgtaatttccatcatggcactgagcaggaggcaggatgggctgaagggaaatacactgaactgaactggatccttaggcctgtgggtgagacacagtattggcagatagtgccttcaccttgtggctcagtttcttcaggtttcaaaattgagagacttttttcacttttacatgttaagtaggtaaggatgaacggaaggattgtgatgtattgcatattggaagaaacaaaggtatcaggtcaaaattaagaagggtttatttgtggaattactgcagggagaatatccactgagctcagccattgaactcaagaacctgttagtaattaagaatatgaaaagattgtgaattgagcaccttctctgcaccatgccccgtacaaagtggattatacacaatatttcatttgctgttcacagtgatgttgacatagaggtttattgttattgctttattataaacaagtaaccccaaacaaagaggggataaaaaagtgatagattcccatgtgagagctcactaacccatggtatcccaatcagagggctagagcattggaatgacgtgtgaagacactgttgatgttaggtaattcccaggttggttaatgtttgggcaggaggggtataacttctctggcctccaatatgtgttaggcaccccttctgtgtgcttacgtagagctctgtaggcactcctctcagctccatttctccatgttgcaatttctggttatttgtttatacactactctaggagctccttgaggtagagagttctgtcttgttgactatgttatctgcaaatcttcatagagagccaggtacatggaaatgctaatacatttctatggaattagtgaaggtggacattcatacgtccaggcatatgaacaggtttttctctggagttggtgttgtttggtgtagaagggctgtcaatgagccttatgacttgaggaaggatcaacagatgggtggatagaagtacagatggttatatgcatggatggaaagggaatatggtagaagagaatgcttctgtcatgggctctaggaagtttactgaaatatattctgaaaggttgatatgtatagttcatccttattcttcccagcctctcttttctgagatgaccaaactattcaacataaatggtttcctgctgctcttaaatatttccaggacacttctgggtctcctgaagcacctgcttgctcacagcttcattctcacgtgaagtctgcataggtcctgttaccatatcagaactcttagaggacacttattctgggctgaggttttccaaggtgagaactccaggactggagatggagcagtgcatttaggtgaagtgatatcaaacaaggttggggttggtgttacttcccatcccagtgctggacacagccttggccaggtcctgttgtgaccccaggtgcacggggccttgggaacttctgaaagggtgtggagtgctccacccagccctgttggaggaggatgggagcgaaagcaacagatgtgctcaaggttctgttttcagttccccaaagggtcttctccttgaccaaagcagtgtgacggttgctatgacagttgctatcttggtccctgggactctccctcataaggtagcattactttttttaatcttctcaggcaagtaaccatgaaactctgtaataaccagtctgaggtggggctggttgggggcatgtttgggcctgagtactgggatgtgatggtggaatatgctggggtaccaagaggtacctttgattaatgagttatttttccaaattagaccaacactcctcctagttgtcttaggcttgatgactctccatttctgcagaagttcagaattcttcccttgagatgtctgcaattagttcattgttgcaaattataaaaacataacaggtagaaagaacactgaccttgaatctcaaatctgtctctaccaggtcatgtcattcagtctctgcttgggtcttctcatgtgttaaatgagagctttgatttccaagctccttttcactctgagagtcactgatgttttgcctctgaaaatggcaaccatgaagagtagttactgagaaaccagcactgtgttttagagttagggctcttgatcaggctgcctcattttgaatcctgatttgggaatttctgatgatgtgatcttggacatggtattgactttctctaagtcttagtttttttttttttttttatctgcaaaagagggtaaaacaagctaccccagaggctgctggaagattcagtgacatgttgcttgtcagtgttgagacattgtatccattacaactatcatagaataaaaacctgttacaagttggcatgggccgagctgccagcaatttcatacatctcttttatgcctattttgtttttcattttgatcatcaatattttaatggtgtgtcataaattgggggctctttcttatttgttcttggacccatggtgaaataaaagcttgtatatttttttagaaggattcatagagatgaaaggcccttactgaacattcagtctgaccttattagttttaaaggagctgactgagacctaactgttattattacaaactgatattattggaaaccaacacagaacctaccatgtgcaaaactgtgggaaaggcttggaagtctgggtttgacaacctgagtttaaatagtgattctttgtcttactagctccgtaatcccaaacacgtaatgcaatctttcttagtctgtttcttcatctatgagacagggctaatgagaaacatctcagtgtatggtatgacagcaaagggggtcatacaggtgacagtgctagcaaatgtcagtcccctcctcttctctacctcccaactcccttgaccctctcctctgtcatcccttttctggctgcgtgcagagaatcttgctagctttagggatacaaaaggttccagagttgggagacagactgttctcatacagagatcaataaccacatgatatgggtagtaagggccattcagatcctgagaagagtttggcaggtcaatggagggtggaaaggatgagaggaactggggagagagacagagaagagggaaggaaaaggaagggagaaaagaggacattgtgtatctgagaacaggaaaggagcaagtggaatggaagaaggagagggaaggcagcaggtgagggcatgtctgttggggtgtttatggagggttttttcagggaaagggtctgcaaatggagccaacaagaaaggaactggcaggtggtcaggatgtcctcctgtgagagtcactcttctccccatcctctctcctcttagcttcaccctcgctagaacttttccttgctcatttcaattttcaagattttcccaagcttctaaacctacaaaatctaagcgacacacatttactggagaaatcacaaacagatcccagccctcctgtggacctctctgcatctgtgccctggatacctctttctcctttgtttctgtggatgaaacatctgtgttcctagctgaggatgatacctctacctgtcttcacccacccttctcacctactcaggaacattgctccagcaatttctcttctctcctcttcagcaccagcttttccctttctaccaaatcattcttatcagcacttaaaaatgctgtcgtttctctccatttaaaataaaccctcacctgtgtatcatgtagaactatcaataagaaaaatattaaaaaataagaaaataaagaaaaaagataaaatatatcctctgtagagcccctttgtccttccagtgaccacctcatttctctccttccctcttctaattctctccttgaaagcattgtccatgcatgctctctccaatttcttcgctctcattctcttttgaacccatttggatcagacttttgcccctggcattctatagaaactgcacttgtctagttcaccagtgattcccaatatggctaaatccaatggcccatttccattcctaatcttggttgacttgtcatcagcaattgacacagttgatccattttttcctctttgtaacatttttcctcttggatcctaggataacaacactgtcctgtttttttcatctccttctctagccagtctatttcaatcttcttttctggttcctcctcatcttgctgacttctttacgttggagtgcctcctggctcagtgcttggatttcttttttggtatgtcgttgctaggtactctctcccagtctgatggctttttacaccatgtgtgtggtgatgacatcacgtttgtgtctccagcactgacctcttgcttctgaattctagactcttatagccagttgtccatctgacatctccactttgttgtctaatagacatctcagactcaacgtacccaaaacagagctcctaaagcttcaggaatcgagactgtgtctattgacataaggataataaaattgattaggggaattaaataaaatagaaatagaccaaacttacattgtcatttgatttccaacaaaagcaccaaagcaatctaatgggaaagaaaagtctttacacgaatagtgctggaattttcagcagctcatgaaatgtatatatattttatgaaaaaaagtaaaaataaaagtaaaaaatggtgctggaacagctgcacatccacatggaaaaaatgaaccttgacccttacctcatgctatacacaaaaattaattccaggtgaattaaagttgagctcccaaacctatgcctatgttctatagacttcttcatttcagttaaggcaactctatccttccaattcatcaggctgaaaaccctggattcccccttcagttttctctcttccccacatcaacactagcagtgcttcctggcagggctactttcaaagtagcttcatctcctgcttggattatgtaacaggctcccaactggggtttccacacatcttcctatcccaccctggatgggttattctcatcagatcacccagagaaatcctgtttatgtatgtcagatgatattattattatttttattatttttgagacagggtctcactctgtctctcaggctgcagtacagtagcacgatcacagcttactgcagcctccacctccctgggctccctacctcagcctcccaagtagctaggactacaggcacacaccaccacgcctggctaattgtttgtataatattttttgtagagacagggtttccccatgttgcctagtctggtctcaaactccacccacctcagcctccctaagtgctgggattactggcgtgagccaccgtctccggcctcaatattattattttgctcaaagcctaccagcctcatctcacttaaaagaaatgcttcctgtgacccacaaaacccgacatgacctgccctccctataaccctgtgtcatgagcactccgggcacatgcccacctcagggctttttatttgcagttcctgctgtgctcttacctatttatccacatggtttacttcccacttcatttaaatctttacctgaatgctaccttcttagtgacacctttcctgatgaccctgtcaaaacttataaccctcctccaacaattcctgcccttgctttaatgctctgtttaccccgtcgttatctaaaatactatattttaaaatttatcaatctttatcatttatctccccagctagactataagcttcacaaaggcagggagttttacctgtgtgatagcctcaggatcaaagacagtacctggcacatttcaggcattcaatacatacttactgaatgaaagaataaagtgtggccaggcgcggtggctcacacctgtaatcccagcactttgggagactgaggtgggtggatcatctgtggtcaggagtttgaggccagcctgacgaacatggtgaaaccctgtctccactaaaaatacaaaattaaccgggcatagtggcacatgcttgtaatcccagctactcaggaggctgaggcaggagaatcacttgaacctgggaggcagaggttgcagtgagctgagattgcaccattgcactccagcgtggacaacaagagcaaaactccatctcaaaaaaaaaaaaaaaaaagactaaattgtgattgaggtttacagatgactggtcagtgtttcccatatccccaaactgttttcctgcttgatgctattatttcatggggcaagttcaatttccttatccattgcttgactgtccaattagattggcagagcgttaatggcaaggactgtgtatcttatcttgtactgttctatatcctccactattgctgccattgtgagggggaacaagggagtggcttccctccatccagttccctacatcatatgtcatatcatacaaatatattagtatttataaatatattaggtctacctccttctctgtgcaaaatatgtcatatcaatgtctgagttctagtatgttcatattcttgggcaattatgtaattatggcttatgttgtcataacttctatgcccgtatttataagaaaaaaatattgagagcatttccaggaaaataattgactggaagaagagagagtggtaaaaaggaattaatagtgagctaactatcagtatatacaagcccagccttctaggatctggataacccgaagcaagaatttctctgtcagttttctcatctgtataatggtgagagtgggggtgttgaagtagaaaaatcctttgattaatatttattctaatccttgactaggtgctcagtgttagtccagggaactctatcttatttcttcatgggccagcttaatgtcaagatccaaaactcttgtgtaaagcttgggaccattttcaaggatacatttagtagtttacaataatctagataacactgactgatagaaatatgcaggaaatacagaaaattataatgtgatccacatatataatttagaagttttcactagccatgttataaaagtaaaaagaaatctgtgcaatcaattttaataatatttttgtttgcacacaagatatacagggtaatctcaacatgtaatcatataaaatattaatattttacacgtattttttgtacaaaatgttaaaaattggatgtgtttttacacgtatagcccatcttagtatggactggccttatctccagagctcaataactctgtgtggctagtggcaggatattggatatcaagtctagaacatacgtgaattaattcaaggttcaagcacattaaggctgaaagagttatgactgaagaacaagttcaaggaggaaatcaaacaatagccaaatttcactgagctactccttccattactaatgataacaaatatttatagatcccttagtatatactaggcctgatgcttagaactttatatgaactgtttcatttaatcctcacagcaatcttacaagtaagacctccaccccctttcagatgagaaaactgaagcacaaaagtgcagtaacttgctattatgacttgtgagcatattttcccaggcaattatatgcacagtatgatgtaggtaaagcagcccaataatttattcactatatttctccatgctcatggtaaggactgacttgatccctggtggtcacccacttgtgctccctcagtgagggaagggctgcagagcccctggcccgtgtcctagtgactcaggcttgggatctccagcagctgctatggttgacaatttagtttagtaaaatgttagatcctaccctgataactgttataaaaaatcctccttccccttccccagcacaggtacccagcccaaggggcactttctatggaaagatgaaaagaactgacatggacttgagctcactgggggtgcaggtttcaagaaagaacaaagagagctgttaggttgaagagacgcagttgaagagttaagtcttggaattgttaatacctggaacaaggcacggtgtgaaaagacaaagaaacacacaaacatcaatctgtcctcctcttttctctttctgtttcatttcttatcctccatcagtcagactttgcttcctctttctcctccttcacctcctcctccctgcccttcccaatttctttctatcttccatttattgttcttccaaaattcgtatactcatcctctcttctccctttctcttttctccaaaataatatgttcaacttactgacttgctcagggacttgtgggggcgaatgtattagcaccaaacctaggaaacatggcgaattctaaaaacttgttctcatagaaaaaagagttaaaaatagaaagctacagtccagttttgaagccacagaagacctcactctgatgtatagacattagagtcagaaaaagactttgaaaagaccagtgaagctccttgtcccacagacagtgtgagggagggacaaggggaattgtgtgcccaagcgtacttgggatggtgtaggtggctgataagagtgtcagtggaggtggtggttagcatttggagtgccccaatcttgtgacactaaacatttattgttatactaaccccactgccaactaccaggaagttttcatttttcttactgtgtcttagtctccatggcatctataaactgttttcccccaatgtccaggcatcattcctctcccacagttgatgtctggctctgtgccatgggtgtgggcctgcctcttctctctcagaatgactgctgtttcatgcttggtgagccacgcagtatgccaagctgctgtctctgacctggagaaaggatacccatcctaccacaggtggggcatatcatgggatggccttcctggttttccttggcagacacatttttctcacttttttttttctctcctcccttctctttttccctccctctttgatttcttctcttttccttttctttctcttgcctcacttctgccctagatctaccatgggacccagggagctttggagccatgcaacccacagtgtgctaagctttttactcatgctatttcttttaatcttcacaattctttacctatcaggcattaccatcagatctgcaccttacaggtgagaaagggaggcccacaccgattaagaaatgtgctcagggccacacagcctgtacatgtcagagtaagggcattctcatgccaaggttcattttcagagccaaaagcataccacgtctcaggagaagcaggctagatctcttgtctgcttggcttttaactcatgctgacctgaactttctggatttgagtaactctcagacctgtggagcccgatttctgtgagtggattttgccagccacctggggaggtgaacccttgctggggtatggctcatcagtgtagaagggagttccttcagaggtacgctgtcttctcggccatccccattgtagtagtttcttgggtctgccctaacaaagtaccacaaactaagagccgtaaaacaacagaagtttattctgtcataggtctggagacagaaatctgaattcaaggcacaggcagagttagtgtcttctgcaggttctcggggagaaaccatcccacacctctccagcttctggtggctcccagcaatccttggtgctctttggctctcagctgcatccctctggtctctgcctccttggtcatgtggctttcttcctatgtgtcactgcatctccaatctccttcttcttataaggacaccagtcattggatttagggcccactcggatccagcataaaaaaaaagtttaaaaaaattatttggaaataattatagattcacagaaagtagcaaagacaggatataaagcacagaggtctgatgtgtcctgcacccagtttctcctgttggttacttcttacgtaattacagtacgatattaaaaccaagaatttgacattgataaaataagtgtgtacagttctatgtcattttatcacatgtctagatgcctgcaactaccactgcaatcaagatacagatttatcccatgatcacaaagatctccctttatagtttcgcctactcttctttctccaccaccctaacccctggcaaccagaatctgttctctatccctataattttgtcacttcaacaatgttacataaaaggaatcacatggtatgtgaccctttcagattggcttttttcactcagtagaaagtccttcagaatcactccagttctctgtatcaacacttcgttcctttttattgcctcatagcattctatggcatggatatattacaatttgttaggctagttgcctattgagggatgggttggctctttctagctttggctacaacaaataaagctgctgtgaacaatcatgtatgggttctgtgtggacataagtttttatttcctgggggtaaattcccaaggagtacaattcctgggtcatatggtaggtgtcttttgtttagtttttcaagaaactgacaactattttctagagtagctatacccttttatattcccaccagcaatatatgaatgatccattttcaccgcatcctcacaaacatttcagtatgacctaattttgacttgattacctctgcaaagaccctatttccaaataaagtcacatttatgtgacccatttatgagtaccaagagcaaggagttgagcatacctttttgaaggacacaattccacctgcagcacctgtcttcacttgcttaggttatgggtgggtttcccttcagagtgttatcttctgagaagaaggtttgaattcatagctggattatgcctgcctttgattgttcaatttggcccccagggatgagtgagcaagttcatgtcattggaagggacattactgagtctcacccctactcaaacctccaaagtttgaaagatttgatactcatcaacattctcaagaggcagaagggcaaggtgcttccttatgtagtttctccatgactgtccttccccactttcccagtactgactggaaagaaaaacaaagcaggacaaagggattgtcagtcatttgagggaagggatgctgtgttagttactcctgaaccccttcagagtgtaggcagagagaggtacttagaaaggtgtgttggatggatgagtagctgagaggggcagggccagagtgccccatagaatgaggaagagtcctcatttacatgtgcccttcccccttcccaaacatgtgagtgttcatacatgggtttccagtgtctgggcaaggttaattctgtcctctgtccccttgctgaaggtctgtttcatttaatttctatgtatgtgtgctcctagctagccaaacagggcacagatgccaggaaaatagcaggcctgttgttttgttgagcaccttgagccctggaaggcagactcattcagggctcaagagggcaggattaggcaggtagctatttgatcccaggcccccccacttaccagctgcgtggtcttgacctattacttattcctcttctatctattaactgggtataagatgttctttatgtgaagttattttgaagcataatgtgtatacagaacagtgcacagatcataactgcacaaccccacacgaggaacagaacattaccaagaccccagaagccccttcttgtcttctcccaggcactaactcgcccacccccagctaagagtaatttccatccaaatttctaactttatttttacctggttttgaactttatatggatgaaaacatacagaacatatcttttgcattgagtttctcttatgtaacattatttttatgagattcatctgtgtgagtaggtatagttgtagcttgttaattctcctcattgggtattctaatgtataaacataccacagtttaataactcattctattgttggacaatcgggctatttccaatttttggcttttgtaaataaagctgctttgaacattcttgcatagttttttggtgggtggggacactcagtcatctagaagtgggattgctgagttatagaatatatttgtctctcagctttatagaacctttgcaacattttaatgaatgtttttaatctcacagtatagtgtggattaaattaggttgtggaaagtactcaatacggcccttggcagacaggagtccctcagtacctgtttaaaaatgtaaataaggcatgacattccattaagtctaagtaccatgatgaacttaaacatttccctattgtttgtttatttaattgcttttattgtgttgttattttatatcatgttgcaatgaatgattctctttatagcaggtttcttcttttgaaaaatttgctttggttgattctcagggaattgaatcaaaggatatatgactgtaagacctgtcacccttaaaaaggactatgagggcttgctgaggaggggaaaacaaggaagcaagtctctcctaccatggcccaggggactgtgaggacagaaggcttgtgggtttgagggaggactgtcttgcagaggatgatagggtaaaatagaatgaaggatgatttttataaatggttatgcgccttaggatgactacatatttagtcccttataagagaaattgagtagttggtaaaacaacagataataattattaaatgaggaaagagagaaaccacaggtgcaaagattcactttatttattcattctcctccaacattagcataattaaagccaaggaggaggaggggggtgaggtgaaagatgagctggaggaccgcaataggggtaggtcccctgtggaaaaagggtcagaggccaaaggatgggagggggtcaggctggaactgaggagcaggtgggggcacttctccctctaacactctcccctgttgaagctctttgtgacgggcgagctcaggccctgatgggtgacttcgcaggcgtagactttgtgtttctcgtagtctgctttgctcagcgtcagggtgctgctgaggctgtaggtgctgtccttgctgtcctgctctgtgacactctcctgggagttacccgattggagggcgttatccaccttccactgtactttggcctctctgggatagaagttattcagcaggcacacaacagaggcagttccagatttcaactgctcatcagatggcgggaagatgaagacagatggtgcagccacagttcctgaggaaagaagcaaacaggatggtgtttaagtaacaaagttctgcccttgggtgtgttgtttgcggataatcacagggcatgttagggacagacagaaaacagcatgcttatcccagataattatagcaaggagaccaagaagcgtatttaaaatcttgatgttttgagtttcttcctagcttccccctattccttaataaagttctaaattgttttgttggagctctttgcagccattctgagggctttgcatgcttttctgaccttgcagtaaactcaatgctttaggcaaagaatggccacgtcatccgaccccctcagagtttagaattcagaacaggtctgaagaagaccaggcagcggctgagtcaaggaaagcctccgtccgcttttatttcccctgtgcctcttccaggactgtgctgggataacaggctcccgggggttactttggctgggctgggctaaaacctccctgcagagcaggccctgagccctgcctctgcgcctgggtggtgtcagcccctccaccttctgactgttccagcaactctctaagccctcccaaaggcctcaaggcctgtaaccatatgcagcaattttcagccataccaggagaggtcaactgtaatcttggccacctgcctaagaggaagtggctagcttcacttctgaccctcagcaactgccaggtggcctcttggaaatccccctctgggggattccacccgttgggtgggagagcagtagttaaaatgtaaaataagaatcttttgctgggagaagtcaacagatagggagaagtcagctgataacagaaatagttttttttttttttaaaactaacttcactgttaaccaagcagttcaacatgaaagactgaatctcttatgtttaatattttcttctcttttaatcttcataactaatttttttcagataattgtataaaataaccatggtagcaaaataatgtgatcactggaaaataagcagggaaaaacatgctatgaagatactcctatctgggtgaattcttgatagctttacatttttcatctggcatttaaacattaaacagttaatgtatttgacatgaaaattatttcaagttatcttattagttttaatagagtttaaaaagtgtttaaaagagttttcaaaaggctctaaaatcattttgaaatagtttaaaacagttttgaatcgttgtaagttagttttaatagagctttaaaaaggccctaaaatagtcctatcaagttgttgcagaccaaaataatctccttaaatatcacttttgagatcagctggggtaaacgacagcaacacaatgacaaatcattaaactattttagagattatgaaattaaaatactcagattaaaattttcctatcacagaattaaggtactggaaaatatgtttaagtttttattaatcacattgctataggtttagatattttgtacaactgaaataaaatcacacactggcagctacatttttgaaagttaaaaacatggtcacgaatatatcttattttaaaatcagttaatataccttaatggtatttaatgccaaattcaaagtgaattgatcaagccctcagtggccaggtcatgggtgtgatttttactctgaaagaattacatatttctttctttttggttgagcttttgttatttaaatacatttgatgagaggatattgaaataattaaatagcactgaaaaaaaaaaaagctttaaattatttacaatcccctaatggaaattttcactaatgagatatcataatgaatgtgaattttatttctgaaatctctaataaatcagtcttctccctggttttcccagctcagcgcccattacgtttctgttctctttcccttagtggcattatttgtatcactgtgcatcaggaaagctggctacggcagcatcaatcgggcagacacagggtggccacggccactagcggcaaggcggctgccccaagagcgcggtggcatggccaccaaagccactcaatcgagaaagaccgcggctctgtctacagctcgcggtgccacggccttcttggcagaataaaaatgtagacaagtaataacagaggataatgaaagaacatactctttaaaatatttcctatttttttcacagacccacggtcattaaaaaatgcaattatttactttttttcatttaaacacatttctttgagattgagcttttgggaataaccacctttccaccattacaataagagataatttcacgtttagtctaatgtacaaattggatttttaaaaaatgagctctatctgtgaagcccttattcctatagaatgtgtctttttgagtttattacttattacagactctaaaaacaacattgctgctgattttcaagtaagctgcctcttctacatagcaaataggtacacttcacttttccctgatttttcttagggcgtgctattgatttttattgttgtctgacaaaataatttatcaaacaaaagggagaaagactaaaaaatgtatttttccacttttctgtatcatgcataatcagcaacaaccaatacaatatttggcaagagtgaacaaaaataaatttacttttgctccttagaaatacaagggttcctttttagttacactttttttttttactttgtgtcattcagtttagagcaatttaatctttttttctccaaatccatttttgaagctgagtttaacttttgcaacccatggcaaatcttaaatgccctcatttaccaatctttaccaaactcctatttaagcctctaaaagtcaatactggccatcagacccaaatttcagaagacaatagtgaaaaattacttacgtttaatctccagtcgtgtcccttggccgaaggtgatccacagtgttaacttaattactttccccttaacaaaaatctcttttcgctgttaatatcactaacctgaccgatgcagagaaaatcttgcaattgagatgcctcacttaactggctagcgcttggctgttccttaagatgaactaattttctatcccttactcatctgactttttgaaagaatctggtactctttggaattgacctgagctaatatctcaaacacaaaaacgctccaaatttaaaaccttataagaaaaagcattaggaaagtgcacttacgtttgatctccaccttggtccctccgccgaaagtgagccacagtgagggatctcaccctttcccctcaacaaaaacctctcttgaagccaatcatatgagataggctgcttgttcagagaaaaatctagctatttcttccccatttcccccatgaatcctattctcctctcaaacccaatgattcgtctatttgctcagctttttaagttcattttctggtgtcctgctatttacttctgggtcaccaggtttattcaaccaaaatatcacaaaacttgcacaaatgatacaatggcactaaaatctcacgaataattgagacagatgtacttacgtttgatatccactttggtcccagggccgaaagtgaatcacagtgattcgtcttaacttttccctttacaaaaacctccctgaaagctcagcaagcctctttcccccaatgaagttattttgatttagaaatcttaaaaattagccacaagctagcgtcctgtggaacaatttcccctcctctgtacctaacctgggaatgaagtttgttagatccctggcatccgactaatgaaaatccacacaaaggaacacaaagtaaactaattagcaacagtgaagaatcagtggaaaaaagtacttacgtttgatctccagcttggtcccctggccaaaactgcacacacaatggttcctcttaacttccctcctatacaaaaactccctttctgacaattgaccaaggctctgtccagaacatgttatgttccccaggacatttctgaagctattacttagacaagttattctcacccaatgactgaatcttgcttgctcttcaaagaaaatgtgcaatcaattctcgagtttgactacagacttatctttatcttttccctgaaggatatcagaggctgattgcagagtcaccttatagatcacttcatagacacagggaacagaagacacagacaactgaggaagcaaagtttaaattctactcacgtttgatttccaccttggtcccttggccgaacgtccaccacagtgagagctctccattgtcttgctgaacaaaaacccttctcaccaaaggggaacagagtcctgggtcagctgctgaagctcaactcccttttcgagcaggtgtggaaaccctgaggcttctctgacatagcatgtgtttattttcttaggtgagacctaaaatccaagaagagaatatatttacgtctatggcctgatggttcctttctttagcaacttgccacatctggactgcttattatttatttattttttagaaagtagactgaatgttaattacaaagaaaaacaagcaattaaaaaaaatggccagtttttttgtactttcttttggggtgggctgggggggcttttgcaaaggataaacttcatttagtgtaattatggaaatcatcagcttctcaatgagtaataattacaggttgtcttactattttatcttctcctttgctgcaatgttatttaaaaaaaggtagactaaatatatatcaacttaaggctcataactttgaaatgcattttgaaatgtagctccagatggtatacgaaaccaaagtgaagactaatagagtagaaaagtagactttacttggttggtttgtctgttttcacagcacaggaagagctcagctcttactgagctggaccaggcgcatgccatctttggagctgccatggagtcccagtgttccatagtgtttccatagtaatctcatcaacaacactgaagaccttttcagtattttcttttgagtccagctccatttttgcagccttgtatctctcttaaccttccatctccaccccttccatacattactcccacctccctacactccttagagtttttctatggcctccagctttcacaagcactccctctgcttgggaacatctttgtccacctgggttagcttgtgaactgctaattgtctttcaaaattcaactgaagagagaccttctctcagattagccctgagcaggtgacctgaatttacagagtacagagacaggtcactgggcctagagtacctaattattttttattttatttatttattttttttgagacggagtctcgctctgtcgcccaggctggagtgcagtggtgcgatcttggctcactgcaagctccgcctcccgggttcacaccattctcctgcctcagcctcccgactagctgggactaaaggcgcccgccaccacgcctcgctaattttttgtatttttagtagagacggggtttcaccgtgttagccaggatggtctcgatctcctgacctcgtgatccgcccacctcggcctcccaaagtgctgggattacaggcgtgagccaccgcgcccagccgagtgcctgtttatttttacctgctttcagattctcttctacccttctaaattataagctgtttgatgttttatttgccctgtatttgggaggctccgtccagtatctttacttagcaaatgcttaacaaacattttcagaataaataaaaaaaaatacctaattgaaagtcaataatagatcagagatgctatcatagaccaaagactaatactgactgccacaacagtaacttttacaacagaaatcataactacaattctaaagattaggggtaggtttatttgattctgtcactggcagctttgctagttgccttgaatagcagaattagcatttggtctcaccagaagatgaggaaggagagggatcaagttagaggtggagagttaacattggcaagtgaaatttaatgtgcaaaatagctgaccaagggcatagtccttttttaaaggggacacaaagtgattttctctgcagacatacacgcaataccaatcataaagggtgacatttattgagcacttactaagtgccagacattgtacatggatcatcacatttaattattcccaagactctatgaactaggaactaatattatcccctactttgtaggtgcaaaaacttgagggcagagaggtcaaggaactggcttatggcagtaagtggcagagctgtgacctaaactcagatcccatgtttttaactgaactatatgcagattatactccaggagtaaagtcactcaacggaagcaacaagcgtgacagggaatgctgggatgggggaaggtaaaaggaactccttagactgggataagtgtgtacagacgtatgtataagactacacatggaaatattgtttaaagagtgaaaaataactaaaatcctcattaataggagtttggttaaactgtgctagagctttacaatgtagcacaaagcagacattaaggggaagacgtagacttctatatagttacgtggaaggtgtttgtgaaaatgcaggtcactgaagagtatgtgtggtgagatatcatgatcccatctacattgaatatatatgtatataaatacgggctgaattttaaaagacataaattgtgcttggtagttatctcctgggattgcagaggaggaacaatgacactttatgccatctcctcctactcttctgtatggtgatgtgaatatattcattttatagtttttagaaataataaaactgtactaattttgaaaaacagtaaactctgacattgcctattagcattctcgatattcctgtgcaatgcataaacataactttttaaaagatatgtacacacatgtgtgagttttctttgtcaaatacttttctataatctttaaatcaagcatgccaaaaaggtaaaagctttcctgtttcagtgtaggagatagtcgtctgcaaaggaaagagatgtaggggatagaaacaggaatgaaaaagatgactgagctgttcgagggacttatgttcctaagtgagctaattggaaatctaatatgaacagtgcaaccgaataactattgtaaagcagtatttgtaaacaataaaagatgattatcataagtaccattgttgcaaaaactattttattgatcacatgcagtggtgatctgtaggaatgattgttgtgatgtttgctgtaacataaaatgaaacatgggaagtggctgagatctttaggatgtgtgtggttcattttttgaaagcaaatgttgtctcagaagcatctgtgagactctgccaggatccaccgttctacaaaatatctgtgatggacattgataagattgatctgttgaggaaaggcaaggtgtcagtaagatagtctgagagcttcttggatttcatgtaaaagagtgctggaaatagaatttcttggggaacattccaactaactcatcactgaaggtgctttacattgaaccctcagcaaagttagattatcagaaaaaaaatataaactgctgtggaggggacaggaaggaaagtcagggagggaggggggcaaggagagaaagagcgagagagaggagagaaagagagagagagaggagagagagagcacaagtacacacttcaatgcacatctataaatcatcctgaaaactactgataaattattttagcaatgttcctcagatgtaacatttcaagaaatatcatttttgctttttatttggcataatttactagccaatttaggaagttcccctcacatcagtaacatacagtacatcacccagtatgtcagaggacacaatggcataagtttgccttttgcaaggtttgagggatggccatttccctacctgactcaggaaagtctgtagctgatatccatcttcaagtttgtggttctttctctctatatatatatttgagctcagcagtcatgctggagtccagagtaggtgattctttctgctttagcttgactcctccttaagattgtaactctctcagttttacattttttgtcagacgtaagctgacattccacaaggagaggaggaaattctgtggttcacatccagtggtgcttggaacctgattggttgtcattcttccagctagtttgtcacgagtggatatctgtcctggattcccaaggatcaaggctgccccattagccaggaagtagggagatagaggaggtcacttgagaaagagctgcttctttgccgcctccaggttgtgtctgtttcctctcatatctgaagacagatgtgctggcagaagcaaagtcctttgtccggccacgtgcaaatgcatgggacataaatatgaacagagattcttgtcccactctagaaaatgtagatgttcatcttgtttccaaggggacagtaaggctgcaggtgttttttgacttccttgagagaaagagaagatagcagcaattgtatcagggcttactatcctaggaggggttcagccaccgagatttacatattcagtgctgtggtttttgtttcattttgcaagaggaacgagcccctcaagctctgtcttagagttccctgccctccctgtctacctacttggcacccagcccctatgttctcttctcgtattaaggcatagaaatcatgggcaactactgttcaggctggctctggatgaagttgtgaaatcgatgagttggggcttagttttgcagacccccaaatgccctgataatcctggctcgaaggggtgtccagcccctccacacctgtgggtatttctcgtcaggtgggacgagagactgagaaaagaaataagacacagagacaaagtatagagaaggaacagtgggcccaagggaccgtcactcagcatacggaggacccgcgctggcaccggtctctgagttccctcagtatttattgattactattttcactacctcagcaaggggaatgcggcaggagaacagggtgatagtagggagaaggtcagcaagaaaacatgtgagcaaaggaatctgtgtcacaagtaaattcaagggaaggtactatgcctggatgtgcacgtaggccagatttatgcttctctcacccaaacatctcagtgtagtaaagaacaacagagcagcattgccgccagcatatctcgcctccagccacagagcggttttctcctatctcagaatagaacgaatgtacaatcaggttttacactgagacatgccgttcccaggggcatgcaggagacagagggcttcctcttatctcaaccgcaagaggccttcctcttttactaatcctcctcagcgcagacccttcacgggtgtcaggctgggggacggtcagatctttcccatcccgcaaggccatatctcaggctgtctcagtggggagaaaccttggacaatacccagttttcctgggcagaggtccctgcggctttccgcagtgcactgtgcccctagttaatcgagaatggagaatggcgatgacttttaccaagcatactgcctgtaaacatgttgttaacaaggcacattctgcacagccctagatcccttaaatcttgattccatacaacacatgtttctgtgagcacaaggttggggctaaagttacagattaacagcatctcaaggcaaaacaattgttcaggatacagatcaaaatggagtttcttatgtcttccttttctacatagacaaagtaacagtctgatctctcttttccctatcctggctgaggctagagctccaagtctaagaaggaggataggaggcggacaggccaatggaaacaatgaatgaacaacagatggaaacaaggaatagtgtggatttttgagttcattagcgcgtcctccactctttcaaaacctcctttgcaatgacagaagaaatataaaaatgataatgaatttatttcgtggttggagaatcatgagaggtcctattagaagaaaaaactttgaagaacaccacagagatttaaaccatgtcattgaattcatagagaaactggaatttagaaacattttttccattgcaaaaacaggaggcgtccttgaagcagccagttctagttttccccacagagccccagaaaagccgtacttcagagctatcgggctgggaatggtgataggtggacagtggagagtggaataacacctgggtcatctctctgctggttacagacagcttggccctcatgcttcaggccgtgggaatagagattgaaagaaaaagggggcaagttaataggcattcaatagtaatgggatttaaaaaaccctcccaaaccactagaaggaaaagaaatagacaaaaataataaaccaatccagcaaagtttaggaaaagtgaataaaaaattgaggtaagcacgatacataaaagtacaaattaagtttgaaggaccaagtcaaaatatacagtcacaaactattgtgaatgttaaattatttaaaactttaaataatttatctaaaaataaaaataaaccaaaaagatgactatgtatgttttcaaggatatttgattcactagagaaacagttcatttgcttcctatttatgatgattaaaaactagattgcaaaagttagatgttaatgtaaagaaaactttatgaaaatgataatggatttttatctagtagaaaagataaccccaatgcttatggttttattgctctgtaggacattaacaagttgtgcatcttatttagcaaacttattctaacattagtagatgtgagtgtgtgtgtgtgcgtgtgtgtgtgtgtacgtatacatataggtgtgtgcaggtatgtgtatatgtatgtatgtaggtatatatgtatatactagcaaatgataaagttggttcaaaggacgatgtacagtagtacctccttatccacaattttgctttctggggtttcagttacctgtaggcaactgtagtctgaaaatattaaaaagaaatttctagaaataagaatttactcattttaaattgtgtgccttagtagcgtgatgacatatcatgcccttccgctccataccagcctgggactgaatcatccctttgtccagcgtctccatgctgtctacacttaccctcctgtttagatgcttagtagccctcttggtcatcagattgactgtcatgatatcctagtgtttgtgctcaagtaactcttattttactgaattgttctattttattactagttattgttgttaacctcttactgtgactaattaatgcattttatcataggtaagtgtgtataggaaaaaacatagcatatgtagggttgtgcaatagcatccactggggggagaattttgctgaagttagaacagagaagactgtccagaagaaagaattttctatacttgccaccttttttctgtttggtgtcctcatgtaagtctcagtgttacgatctgtctccccacctcaatcactgccctctgtctctggaaggaaattccccttgggctgaggccagcatggtgccagacaggagagatccagtacccactctggaaaatttcataagataactggttctccaccttcttcagggaccttttatcatatctcatgtgcccatggcatttgtcactgccatctgcacaacactgaactccagcaacatcaactgagaagaaagagagagagagggagaaagagaaagagagagagagaaaagtcgtttgttgattgagccacacaaaattttttttctaattaaattatatatccaggtagctgcaatatgctacaatcccaaatacacatatttattaaatatgattcaaagagcattcattgagtactctgtatcaaggcacaatgtaaaataagtgcaaaattactggtgattgttacgcctttctgtgggactcgactctctctggttggaggtactgtgtgggagcacgtgagctccaatcaggtggtctggagggagcaaaatgcagctgttggaggttaaatatgaagggaaatagcagtaggcatcggatagcatagaatgaaaataaaagtgcatatacttccagtgcctgttttacagattccttgtctttttttttttttttgaagacggagtctccctctgtcgcccaggctggagtgcaatgctgtgatcttggctcactgcaacctccgccttctgggttcaagcgattctcctgcctcagcctgctgagtagctgagattacaggtgcgcaccatcacgcccggctaatttttgtatttttagtagaggcggtgtttcactatgttggtaaggctggtctcgagctcctgacctcgtgatccacctgcctcagcctcccaaagtgctgggattacaggcatgagccagtgcgcctggcctccttgttttttaaaactagttcaaaccctcaactcataatttgggaaattcaggtcataggatgccctgttatttataaggtatccagcaatgcatggaacagaatatttaacttttaaaaaacttatattaggttgttgcaaaagtaattgctgtcattttctcctttctttttctttttctttctttctttctttctttttctttctttctctttcttcttttctttctttttctttctttctctttctttcctttctttcttttctttctctttcttttctttcctttttctttcttgtctttctctttctttctctttctttttctttctttctctttctttcctttctttcttttctttctttctctttctttcctctttcttttctttcccctttctttctttctttctttcttgtctttctttctttcttctttctttctttttttctttccttcttctttccttcctttcctttccttccttcctccctctctccctcccttccttccttttccttccttccttcccttccattcccttcccttccccttccttccttccctccctccctcccttccttccttctctctctctttctttctttcttcctttctttctttctctttcctttcttctttcgttgttgtgttccagaacgatttagtgttacctacagttcccagagaaagaatcctgtcttgaggggtggctggggcagggctactactctccctgctctgtgctctagtggccaggtggatcagctccagctgccaggtcaaatttcctagggaatggaattctgtctttttaacaagaacaaaataggtgcttagtaaatataagatgccttcagcttttagtatatgcataatcataaatataaatttgtttaaaacctgaactattctgatgttctcactggctagccaaacttaaaatgtgtatttggacttgaatttcccaccaagggtgttactagcttctttactgttgcagctgccttttgttttgtttttgaaagtttaaaaaaatacacaagggggcttttgcttcctgaaagatggagtagaattacttttacctatttctctcaagtaaagtaaaaaccccggacattgtacgtaaagcaaacttatgaagactctggaagctggagagaagaaggcagaccagttaggaacattgggacccaaggagcgacccagcagtgcattccacggggtttctttttgcctcatccattccagacttggttctggagaagtttgtcaacccagaaacaccaacaggcccagaaaaacataaagccctaataaaaagctggctctctctagtcaaaggagaaagaaaggggaagcccagtaaaacaattcttaggcagtaacggctctgctccattcaaacacccaacttctccttcctgagtggcaagagaggaaattcgctgagatgagtttaaatgagatccaaagcctcataacacaatactccaaagtccagatttcaaatgaaaaccacacatcccaacaggaaccaggggaaccaggaaaatctcagctttgatgagacagttaagaggcgctaatactgacatgacagagacgttagaattacctgacaagaatgttaaagctgccatcgtaagaacacatcaaactcaacaccaccatcaatgagtaagatcataaatcaacatttctggaaaactccaaccagcaccagcagaattcgcattcttttcaagtgctcatggaacatataccaaaattgccatatactgggccatgtaacaaacctcaacaaatttaatagaactgaaatcacatgaagtgtgttctctgaccacctggaatcaaactggaaatcgataatagaaaaataatgggaaaaatgccaaacccttggaaacaaaacaacacacttctaaacaatccatgggagatttcaaggaaaataaaagattatatattgaatagaataaaactgaagatgtaacatattataatatcaaggatacagtaaaagcccaaagaaatgaaaacttatcccagaaaaatgaaaacttagcacaaaaacgtatacaatacacaactattcatagtggttttatttgtattaaaaaaaaactggaatcagtcaaaatgtcctacaatagattaatggtaaaacaaactgcggtacatccatcccatggaataattagtaataaaaagtagtgagttgggcacggtggttcatacctacaatccatacctacatacctacagcactttgtgaagtagaggtgggagaatcgcttgacctaggagtttgagaccagcgtaggcaacatagtgagaccatgtctctaaaaaaaatttaaaaaaattagctgtgtgttgtgtcccatgcctgtagtcctagctacttgggaggctgaggcaggaggaagcttgagcccaggagttcgaggctgctagagagagttatgatctcgccactgcactccaccctgtgtgacagagtgagactctgtctctaaaaaaaattaaaaaaaaaatagtgagctgttgatacacatgacttgaatggatctgaggggcattatgctgagtataaaggtcacatattgcatgattccatttacataacgtttttgtcttttcaaaaatattgcaaggggtacttggttgcagggtgtgcgcatttttcaatttacaaattggcctcaaattcgtgtattaagtttcattcccacatttgcaatgataagtcctccatggagtttcctcactctacatcctctccaatacttgatattatcaggctttttaatttttttccactcaaatggtcaatacgttgtattttatttttggtttaaaatacatatttgtgttttctgatcactcatgaggttgaccatttaaaaatgtttattggctattggggtctcatctgttgtgaattgcctgtttttaaggtatgcccacttttttattgagtttcttatttttttcactattgcataggagttttcaatctttcttccctcctcttattctttaataacagaatcccaatttttttacagggcaacagtgtcccagccaaaaatctaattcctcagcttctttgcagttaggactgttgagacatcatctgaaatctattgtgcatttctggaaaaattttgcttgatggacagaggcaccactgcttatttctcctttgtgttctatcttcttctatctggaacttggcagaagcacccatcttgcaggatgaaagtcacaagctagagtggaggagcaggcagggaaaggacctgggtcctgcagcagctgtctagctctgaaccacctgcctccagagtccgccttggtgagaaaaatgtatctctttatctgatcaagctcctctagttagatttcaactacatatagctgagtgaatactgatgaatactgaataatgaatgctggtacaactttctaatatcttctcttagagttctgcattgaagtttttaaataagtttagtctatacctttcttttccattttcagtcttcaattttgacttcaagataattctagtcctatgatgtgatttatgtttctaaataatggcatttaccctctttcactattccctggaattggaaaaaataggttatttatttatttatttatttatttatttgggtttgggtaaaacttaaccatatgtttaacaggacctggactttgatttaagcaaacttagggtaaaaacagtttaaagacaatcaaggaaattggaatagaaaatgggtattggatattagggaattactctcaattatgctgggaatcataatggaatggtggttgttttttaaaagtccttatcagttggcaacgtattaatgattggctgaaaaatactgccagtgtctgtgtgtgaggaggtgagagaacagagtaattggatgaggggggaggcggtagttgaaacaagattagcaaaatgttaatttgtgaagcttagggttcattatactatttgtgtatattcatatttctataaacactaaaaatgaaaataaagtggtctcgtgttgctgactgtgactgtcacactctgtcagcagatggcagtgttgtataaaccatgagcctacataggcctaatggatcattgtgcttgctaagtaacaaaatcaatgatacgatataaaccaggtcagattttattgcttttagacaaaagggcaaggtaagatttgcagagtaaagaacaggtacagagtaataataaattattttaaaaattctaagtgattcattaaagtcttatagacaagttgggtagaaaagtacgtaaaaaccccataaacctataaacttactagaattataaaatcatttggtctctctctctctctcaaactctccccttatttgcattttaaatcagtattttcatacatatatatttgcaaaaccttattgatttcattgatgaaaatgacttggagtttgctttaaaaccttacacgataaacataaatattattctgtagttctttttacccaacttttaactggcatagtttaatctatgaaaacagctccatattttaaaagattctctaactatgacaacaggcaacatttcatagatgataaaatgtcttatcaactaatacctaatattttaacttaggttatgtacagtagctttaagaaccagttgtagaatttgatatatagaaaataatatagaccctgtcactgggcaaacttatggtggaatcattttttgtgttgttgtggacaaattagttattctttctgaacccctgtttggatatatattttttaaagcccataatttgggcatcctcataaagtagtgacgtctgaaattaaacaatcaatgtaagagagctagtttcctttctcggcaagagaatatgactctaaaatttatgcccaagttagactatttttatcttgcctctttcccctagaatatttgggtttaattaaaaatttacaatgaaattagaaaaataaaaataaaaatcgaaaatcaaatggagataaaataacagtggtaatcaaaatagacccctattttgatctaaaaaagaaaagaaaaaaagataatttggacatcataaaattaaacttctgctcttcacatggcacgttaagaaaataaaaggcgccacacattgggagaacatattcataaaacacaaatgtgagaaaaaaatcatatgcagaatatacaaagaactctcacagtccatagtaacaacaccccaataaaaacttgaccaaaaatttgaaaggatatgtcatcaaagaaggtatatagtgaagttaaaatactaggctcgagcaagtggaaccctcattcactgctgatgggagtgcaaaagagcacagcaactttggaaaacagtttggcagtttcttataaagttcaacatacacctaccagatgactcagcagtcccaaagctaggaatttacccaagtgaaatgaaatcctgagttcacacaaaaacctgcattggaaagcttacagcaactttattcttagcagctaaaaattagaaatgaccaaatggctttaaattgttaactagataaacaatctgtggcatatccacacaatggaatactactcaacaatagacagtgaactagtgctacacgaaacagcaaggatgaatctcaaatgcattctcctaagtgaacaagtgaacaaagccagactcaaaaggcttcacattgcatggctctatttacatgacattcaggaagaggcaaacgattggatcagacaaaaaccagtggttgccaagggctggggtgaaggaaggggcataaaggaactttaaaggatgagggacttgtcctatatcttgaatgtggttgtggttacacagctatgcatttgccaaaacttatagaaatatacacgaaaaggtggcttttattgtaatttatacctcagtaaacctcacttaaaataagcagtttttgattgaacataaaatctggttctgagcttcttggaaaccgactaaatgaagataatgtgttatgttacataactttcatctaggggaaaaatttctagtttctacgtgtgactgaaggttttcctgggataaaagttgaagacaatttctatcttggggcattgcataggagctgctaaatggataatattgggggcactgcatagaaacggcattggataatactctcagtagtaatttcatagagaataaaaaacagaattcgtatgatcttttttttacttgtataaatttaagcaatacaggtgcaattttgctacatagctatactgtgtagtggtgaagtctgggcttttagtgtatctatcgcctgaatcatgtatattgtatccatttagtattttctcatcactcaacctccttccacccttccacccatctcaatctccagtgtttatcataccacactctatgtccatgtgtacacatcatttagctcccacttataagtgagaacatgtgacatttgaccttctgtttttgaattatccacttaagataatggcctccagttccaaccacattgctgcaaaagacatgatttcattcttttctttatagctgaatagtatttcattgtggtatgtgtatacacacacacacacacacacacacaccacgttttctttatccaatcatctgttgatggacatttgggttgattccatatctttgctattgtgaatagtgctgcaataaacaagtgagtgcagatatcttttttatataataatttatttccctttgggtagatacccagttgtggtattgctgaaccacatggtagttctatttctagttctttgagaaatctccatagtgttttccacagaagctgtactagtttacattcccactaataatgtgtaagtattcccttttctctgcatccttgccaacatgttattttttggtgttttaataataggcattctgactgctgtaagataatatctcattgtggttttaacttgcgattctctagtgattagtgatttgagcattttgttttttgtacgcttcttggccatttgtatactgtattagtctgttcttatgctgctaataaagacatacccaagattgggtaatttacaaagaaaaagtggtttaattgactcagttccatatggctggagaggcctcacaatcatggcagaaggcaaaggagaagcaaaggcacatattacatggaggcaggcaagagagtgtgtgcaggggaactcccctttataaaatcatcagatctcataggacttattcagtatcatgagaacagcatgggacaaacctgcccccatgattcaattacctcccaccgggtctctcccatgatatgtggggattattacaatttagggtgagatctgggtggagacacagagccaaaccatatcatataccttcttttgaaaaatgtctattcatgtcctttgcccacttttttggtggggttattttgctgttgttgttgaattgtttgagttccttctaaattctggacattatttccctgtaggatgcatagtttgcaaatattttcacccattctgcagattatctgttcactctattgattatttctcttgctgttcagaagcgttctagtttaattaagtcctgtttgtctatttttgttttggtgcttgtgcttttgatatcttagtcctgagttcttcacctagattaattccagaagcattttccctaggttttcttctagtgtttttgtagttacaggtcttatatgtaagtctttaatctgtcttgagttaacttttgtatttggtgagagatagaggtctagttccattcttctgcatatggcaattcaatttccccagtactgtctattgaaaaggatccatatgactatttcttgtataaatgttgaatgtgaatagagaacatcagatggcaaagctggtatgtggctttaccatctgtaaacagatggtggactgtccatctggtggtctcagagggtggcctcctaggtattcaccttgatgaagttagcagagctgaggccacacttttagacttgtgtgctcacaaacccttggatgcaaattcagagctggatagattcattctattgcaaaccaacatgttgatttattcatctgtgcctagaaatctaaccattctgtaaacttgatgacagcatcctctggccagcatgtttcttcctagttggaggcgtggtgtgtttgatggagcatcaacttagacacagaattagaatcttaactctgcatcttatgaactgggtgtgacattaggtaaattacttaactttccccaagcctcaaatttctcatctgaaatgtggaaataataacgtttctcttataaacttgctgtgaggagtaaataaaatagtgtttatgaattacttagcatagtccctgggcatgtaatttcttagtaagtactaatttttgttggttagatccagttacaggggaagcaaatttacagatatgtggttcatgagcaacagattttctggattattgtcttacacacagtaaccagactgatctttaaaaatcacaaacaagaaacaaatcaaattattcccctgcttaaactctctggaggtttcttattgcacttagaaactcattgtcatgatccctaggccaacacctgtggttcccacccttggctggtgtgcatagaatcttctggagaactttgaaaactactggtgcccaaattgatgcctagagattccgaagagtctggtccatgtggggactgggcactgtgacttttattagctctctagttgtttccagtatgatcttgccctgacccctccctcctgtctgtgtttcttattgggccttctctccttccctgctcctatgactgggacctcccttctaatctttgaatgtgctgagctcttccttcaggaccgaaagcctcttcattactgagccaggtgctaccaccccttctatgtcaagctcacattccatcttcgttatgactctggcctctggtcagaacgtggggtgctctttcccttcaggaagttgggacttggagggctgggacttcaccatcagagtcttttgtgcctggttgtagttggaatctcgtgcattttcatgtagaggttacactgtttgcagggcccatctggtcttcacagtgaagagagaagtcttagctgttcaaaagtcatgttgcttgctattggagcccctgatatgtggcccagattatggtaaggcgagtgagtgaggcattgccttggtcataaattttaaggaggtcccgcaaactcagtagtcaagataaataatattttaatgcaatatttaaacaatcaaaattaatgcaaaaaatccatgatgaaaaaaaaatcagaattcaggtcaattccaggttgatttagtgaataaagagatatcaatagggactgctttatttttttatattttatttacttaatttttttttttttaagatggaagtctcgctctgttgcccaggctggagtgcactggcacaatcttggctcactacaacctccacctcctgggttcaagtgattctcctgcctcagcctcccaagtagctgggattacaactgcctgccacaactcctgaataattttgtatttttaatagggacggggtttcaccatgttggccaggctggtcttgaactcctgagctcaagtaatccacccgccttggcctcccaaagtgctgggattacaggtgtaagccaacacgcccagtcacggactgttttatatttgtggttaagggggatttaagggataatttgagtctgttctgctttcttgggttgtgtttctcaaactggcttatggggatttccagcgatgtaaattttgtgatgaaaatattttatagtaaagcacacatggccatattgtggaaagaaatgccaaaattttatgaaactttaaaataaatcaagctcaactactggagaagctgaggtaggaggatcgcttgagcccgggagttggaggttacagtgagccatgcattcgaaagcagaacagaatcgaattatccctcgaatgcgctacagccacaatataaaacagtcattactgatatctctttattcactagatagatcctgaattgtctcgctctgtctcccaggctggagtgcagtgcgagaccttgtctctaaaacaaataaataaataaatacaaacaaaaacaagctcaagactttgaagaaatgataccccggagctttcagaccagagactcccgagttacacacattttcttctttctgccactaggtggaggcagtggagcaggttgagaatcactgtcataaagcttgtaattaaagaacatcagagtgccagacagtggagctgctataaagtgcagaataactactcctgtcctatacttggtcgcgtatgagcgggaagtgaatggaagggaggctcgaaacaatgggaagagccgtaagaatcaggtctgataaacttacataaacggccttgcacacaacttttctggctgaacctgcacttcccataagtcaaatgcaaatgttggaaggaatatcttgcgaggttctttctagcttgtacagcctgagctattttaaaggagaaaagctgacgagcaatcgtccttggaatttgcagtgcataaacttgaccagcaaagggcagcagtgcacacaccttttaaaaagtaactttccaaattttctactgccatgagagagttctgattctacaaataggagacagtgtttggaccacttaataacaaccaaccataaaagtaaattttctttttattaaaccttttaattttacatttgtaaacagaaaagaaatccttattttgttggctctgggacatcactttcttggttcaactccttcctcctgaccactgcttctaagtctcctgtgctgttttcttctcatctcttcgacctctacttgttgggttacctgccaggtcccagcctgccttcattgatttaactcattgctagtaacctcgccctgtttcccaaatttgcatctccacccggactatttcccgaactccagaatcacgcatattcatccacctgtccaagggatattgccaattagaggtctagcaggcatctcaaatgtctaatatgttcaactctaatccctgattcccgcctgccttccccatctcagaaaatgtccttccaaattctctagttgctcaggttaaacacttgcaaccaccttgatttcacgtttctcccacgcctcacatccaatatgttaacaaattctattttttctacctttgaaacatgaccagaatctgacacttttcaccacagttgccactgagcctcttgactattatcaagaaaggagatgtgttctgttttgtaaagattattaaaagatgttaaattgggactttttttgtatttgttttgtaaggtatctcaaaggccaagaataatataatggatattgtgttctctaatggaacaattcattttctctcctcctccactgcatttttggggatggtggaagtattggaggattttcagaataagaaacaattttattgctgttcaccagatgtcaggagggtatggtgtggtgggcctgggagtggactgtttaaccctagaacttagaaaccagtgtccctgtggagcacaaaccctaataggtcttggtgagtaacagaatagataaaagagagctcagtctggtcataaatcctttggccagttgccattcattgccatgagaaattccccaagaagacacccacctctttttcaggcaattctgtttactagattctggaggattcgttatcatcgaagaaccctgccttctagtcagatggtgcattagtcagaattctttttgcaagtaacataagtcagctgtaacacatacaagtagaaaaggaattagaaaaagaaaagtagttatactaatgtgaaagaaaaaataaacctcaggaccccaaaaatcactaagccaaaagggaaagtcaagctgggaattgcatcaggcaaacctgcctcccattttattcctaaataagatagctacaaagaaaaaaaagctacatacctccctcacaatttgcccacaaggtaattccttgtggacaaagaaaggacagagctcaaagtcatccctctgttcacttcagacaaatgcatatgcaatgcttcttctgccctactgtttcaataagccagactaaggcataaatgactatttctctacctgcctttcacatgtgaaaggctgatcagagactcaaaacaatgcaaccccagcaggaagcccccttccctgccttgagttgtcacacctttccagaccaaagcgatgcacatcttctacatatcgattgatgtttcttgtctccctaaaatgtataacaccaagctgtgccccgacccccttgggcacatatatcaggacctctggagactttatcatgggcttgtccttaatcttgggaaaataaactttctaaattaattgagatctgtctcatactttgagttcacactaggttgttcacaaagacacaaggaaggctatagatccaggatggggctatgcaggtggaaaatgtacctttgatcatgtcaccaaaccagtccagggatacgcccaaaacatgcttggcagcatgaggctgcagtgtgcactgatgacattagtgcttatggacttggtctcactgctagtgagagtcattttcttgattatttttctcaaatttgggtgaggtgaatgtgtagctccacaagatggtgtagagggggcaatgtgaagccatgtaaccttattgaacatctttttggagtgtccattttacttgaatggctcatggaaaaaaattatattaaaatttatacacacataaaaggcacaagttgtagtatttactacgagaagaaaacatgatttaagagataagcttcaaactgcacaaatagcagtaggggagacgaagatagttattcacttccctctgctgcttattgtgaaccatgagaagccccatcttaaagcgtctgaggaagtacatggacttataatagcaaatctatgcatatatcttattttagccttttctgctagactttgggttggagaagtgatgtgagaaggtgtaaagagcacaaaattaggagtcaaaaggcctggttttagcctcagctctgccacgaactaagtgacctgggttaagatatttctatctgtgccctctaagatatttccttacatcaaagaatgcaatagataatttctaaggttctttttggcttttagtctctaggtcattggaatggagacgttaggcgagcattcttctttggagctgtagaacattagtttgatcaccagaaggcacaggatcccatggtgatataggattataggaaatgaacaaaacacagtcttctctcatgcacttctctcacagtcttctctcacttctctctctcttttctgttttgtgtatttatattttccataatagggtaggttataccactgccccaaatctcatggcctagctccaacaaatgcttatatcttgctcatgctacaatcttcaccagggccagaaaggtgctctgctccatgcagccactcaaggatccaggcagacagaggctctaccatcttgtatttgcaccatttggagcacatggcctcttaagttgcttatacagataaaggatagactggaaaattccgtaagatctttttcctgcctcagcctgcaaaggatgtatgtatgcctatttctttggccatagcatttgtaaggagactgggacatataggtgagcaaatggaacatatacaaagtaataatgtctctaagataaatatttacaattcacaaatgtacaaagaattttatagatgcatccataattcacattttgtgtcattatcaccattttctcctaaattacataaaacttattttatttattgacatgtgcttcatatttatcatttatcactgcctgctaattttcatcaggagcatcaatggctattcaatatcctatttatgtaccatagtttataaatgtattgacatttaagtgataatttattatggttttttgctattataacttattgaattgatgaaatgacatacttttattaactgatttttctaatattaatttctagttccatgaggctttccactttggatggtaaaaagggagatagcatttctacttatatgcataaattaattctaggtagtgaattttatttatctgggaataatttttagatatggcaactctcattcattttgacaagaaaaatctaaagctcataaaccctgaatcctatatgcttactctcacaaaaatctctaatgtcctgctgggatttatccacagtttagattagacctggaatacatatggtcatgcaacaatgatcttagaacaggactttaacttggctttaggaactgaggctgagagtaatagaattgatttttttgtgtgtgtgtgaagctcctattataataattagaatactttgattcactcagttaaagttttcccctgatttattgtgtacatacaatgaaggatcaagaaagagaaatttttaaatggaagcattagccagacaagtttgacctcacagttttactaggggatatatcacctagttttggatctatttctaacatcttaacattgtgaaaagagtcttgggaaactggttaaatcccaaagaatgctgcaataggaggttggcccttatgagttatttaatatcttgagctgccttcggaaaatgttgctgagcaggcattgaagagtatcgataaaatttattgagaatttgtttattatgattaacagaggtaaaagccagtatattactgattaatataggtaaaaggcagttaagaaattgggaatgctttctcttctgctttcttctacgatgcacaaggcgtttcacatttatgcccctatgaaaattactaggctgtcctagtcattagatctttcagcagtttgtagttttagagcttctaagttgacttctgtcttttctattcatacaattacacattctgtgatgatatttttggctcttgatttacattgggtactttcacaacccactgctcatgaaatttgcttttgtactcactggttgtttttgcataggcccctccaggccacgaccagctgtttggattttataaacgggccgtttgcattgtgaactgagctacaacaggcaggcaggggcagcaagatggtgttgcagacccaggtcttcatttctctgttgctctggatctctggtgaggaattaaaaagtgccacagtcttttcagagtaatatctgtgtagaaataaaaaaaattaagatatagttggaaataatgactatttccaatatggatccaattatctgctgacttataatactactagaaagcaaatttaaatgacatatttcaattatatctgagacagcgtgtataagtttatgtataatcattgtccattactgactacaggtgcctacggggacatcgtgatgacccagtctccagactccctggctgtgtctctgggcgagagggccaccatcaactgcaagtccagccagagtgttttatacagctccaacaataagaactacttagcttggtaccagcagaaaccaggacagcctcctaagctgctcatttactgggcatctacccgggaatccggggtccctgaccgattcagtggcagcgggtctgggacagatttcactctcaccatcagcagcctgcaggctgaagatgtggcagtttattactgtcagcaatattatagtactcctcccacagtgcttcagcctcgaacacaaacctcctccccatacgctgggccagtaggtctttgctgcagcagctgcttcctctgcacacagcccccaacatgcatgcttcctctgtgtgttggggaggtcactctcttgatttattcgttggagggtttgcagggcccaggattaaattaagagacttgacttttgctggatctctttttgtagaagattattaaagcaaaatgttgtaaagatcccttagagacattgtcaggagtttttgtgttgcaggaacctgcatgtttcacatggacacatcacatgaccgagccaaatagatttatctttactctctagaacagggtccactcagttttacgcacagatgggtcaattctttcctctatgtgcctccttgactctggaaagtttctacttggattcctaattctcttttttctttcttcatctgcaatccttcccaatattaaaccttgatccttcctattcatagcctcccacatagaaggtagtgtccctctgtagctttttccttccagagaccctgtttctttccatcatattaatactttcataggcaattttctaattctttattactctagaaatatgtgacagcatttctcattgccttttacaatagtttgccaactttcttcttatttatcatttttccatttttaattttcatggtatacagtagaaagattatatacacacacacacacacacatatatatatacacatatgtatatatatttatggggtacctgagatgtttagatacaggcatgcaatgtgtaataatcacatcatggagaatggggtctccagccccttaagcatttatcctttgtgttacaaacaatccaattacactcttttagttatttaaaaatgtatagttaagttattattgactaaagtcaccctgttgtactagcaaatagtaggacttattcattctttctaagtattttttgtatggattaactatccccactttccccctactccccacccctgcccactactcttctcagcctctggtcgctatccttctagtctctatgttcataaattctattgttttcatttttagactcttcatatacatgagaataaatgatgtttgtcttcctgtacatggcttatttcactaaacgtaatgacgttcgttagttccatccaaattgttgcaaatgacaggacctcattctattttatggctgaatagtactccattgtgtttatgtactacattttctttttctgttcatctgttgatggacatttaggttgcttccagatcttagctattgcgaacagtgctgcaacaaatatgggagagcagatatctctttgatatactgatttcctttgttttgggtatatacccagcagtggagttgctgaatgatatcgtagctctatttttagctttttgaggaacctccaaactgttctccatagtgggtgtactaatttacattctcaccaacagtgtataagggttcctttttctccacattcttgccagcttttgttatcgcctgtctcttggatataagccattttaactggggcgagatgatatctcattgtagttttgatttgcatttctctaatgatcaatgatgctgagcaccttttaatatgcctgcttgtcatttgtttgtcttcttttgagaaacgtctattcaaatcctgtgcctatttttgattggattattagactttttcctatagagttgttttagctcctcatacatattatggttcttaatctcttgtcagatggatagtttgtaaattttttctcctattctgtggttgcctcttcacttttttgattgcttcctttgctgtatagaagcttttaaacttaatgtgatcccatttgtccatttttgctttgattgcctgtgctagtggggtattactcacgaaatctttgcccagactgatgtcatggagagtttcccaaatgttttcttgtagtagtttcatagtttgaggtcttagatttgtctttaatccattttgatttgctttttctatatggtgagagattgaagtctagtttcattctcttgcatatggatagccaatttccccagcattatttattgaagagattcttttccctagtgtaaattgatgacatctttgttgaaaatgaattgactgcaggtatgtggatttgtattgcagggttctctattctttccattggtctatgtgtctcttttttatgccagtgccaccctgttttggttactatagctctgagtataatttgaagtcaggtaatgcaattctttcagttttgttctttttgcttaagatagctttggctattgtgggtcctttgtggtttaatataaatttaagggttgttttttctatttctgtgagaaatgtcattggcgttttgatagggattgcattgaatctgtagattgctttgggtactatggaaattttaacaatgctgatttttccaatccttaagcatgaaatatctttccattttttggtgtcttcttcaatttctttcattggtattttatagttttcattataaagatctttcacttgtttggttaattcttatgaatttaagtatggttattgtaaatgggattatttttaattttttgtcagagtgttcactgttggcatatagaaatactgttgtttttttgtatgttgattttgtgtcctccaactttactgaactggtttatcagttctaagagttttttagtggagtccttaggtttttcaaaatatgagatcatataatcgcctaacaagaataatttgacttcttccattgaatttttgatctccttaatttctttcttttgtctgattgctctagctaggacttccagtaccatgctgaataagagtggtgaaagtgggcatccttgtcatgttccagatctctcaggaaaggctttcacttttcccccattcagtgtgtctgttatatatagtttttattatgttaagatatgtttcttctacatccagtttattaagtggtttttatttatttatttatttttgtttgtttgttttttacacatcacttcttttggccattcctagctccaagagggtctgtgttgatgttgttattgttttctaataaggaaaaagaggaaaactgaggttaggagacaagtagccacctgtgtacagggtcagacataaagtcaaatgatcactgatggagctctggtgataggcctctcttaaaaatcaccaaacttaatgcaaaatcctaaggactccatacctaaaaccccctaaaatgagatcagtgaaaatgagcagtgggcaaaattgggacccatgagaatgtatccagtaggatcatgatcagtcaagcaaatgggtttaacttggctttcctggtttattattatttatttcctggtttattattattatactttaagttctgggatacatgtgcagaacgtgcaggtttgttacataggtatacacatgccatggtggtttgctgcacccatcaactgatcatctacattaggtatttctcctaatgctatccctcccctagcccccgctctccccccgcaggccctgatgtgtgatgctcccctacctgtgtccatgtgttttcattgttcaactcctacttataagtgagaacatgcagtgtttggttttctgttcctgtgttagtttgctgagaatgatggtttccagcttcatccatgtccctgcaaaggacatgaactcatccctttttatggctgcatagtattccatggtatatatgtgccacattttctttatccagtctatcattgctgggcatttgggttggttctaagtctttgctattgtgaatggtgctgcaataaacatacgtgtgcatgtgttttatagtagaatgacttataattctttgggtatatacccagtaatgggattgctgggtgaaatggtatttcttgttctagatccttgaggaattgccacactgtcttctttggtacgtgtaaattgttgaactaatttacacgtaccaaaacagatatatagaccaatggaacagaacagtggcctcagaaataatgccacacatccacaaccatctgatatttgacaaacttgacaaaaacaagcaatgaagaaaggattccctatttaataaatggtgttgggaaaactggctagccatatgcagaaaactgaaactggatcccttccttacaccttatacaaaaattaactcaaggtagattgaagacttaaatgtttaagatctaaaaccataaaaaccctagaagaaaatgtaggcaataccattcaggacataggcatgagcaaagacttcttaagcatttttttgatagagtagcacagataagtatctgtctgttttttttttccaactgtatttccttctgctctatttttttctgtctctgcaacttcaaatatttgtaaattaattattgagaaaataataatagtaataataataattattattatttgagacagggtctcactcagtcacctaggctggagtgcagtggtgcaatctcagttcactgcaacttctgactcatgggttcaagcaattctcctgcctcatcctcctgagtagctaggtctacaggtgtacaccaccaagcctggctaatttttgtatttttagtagagacagagttttaccatgttggccaggctggtctgaaactcctgacctcaagtgatccgcccaccttggcctcccaaagtgctaggattacaggcatgagccaccgcaccctgctgagataatgattttttaatcaaataactaagttttctttctgttctctatatattgatgtatgttgtatattgtcattgaaattttgattatactcaccatgggatatcttactttggaataggtggcatctcaaatacaatttatttcctttggcagaaggggattattttgttgtgaattcaaaccttcattaacttcagtgtaacataataccataagtgatgtttcctgttattaaatcacaaacagtattaggaatgagaggctgaagcaggagaatggcttgagctcacagatttgaggccagtttgagtgacatagtgagaccccttgtgaaaaaaaagagaaaattttaaatgcggtatatttaaaacacatatttctagacatttattactggtatatggaaatcatgtttattatctaatatcataaactctgacatgatcactatcatttctttagtttttaataaattttcagcatttgtgtatgtcatatgtatttattgattgacatagaccttaatgtcttataatataatacagaagtggacatgagcatattataatttaattaaaaaaatgaaagaatttccacttagaagaccaccatagctgttgctataaatgcagaaataaacacaaacttaactaaaaattcatgtgtatgatgacatcggagagctacagaagacacaaaggttagatgacctaaaattctagagaagaaatagacctctgtaggtgaggtaaatctgagctctcatttagttctttttttgtgtgtgtggtttccatggaatctatttaatcaaaactgcagaaggttctagaaaaacacatttttaaccaaggactgccgatgattctaagttttgagtaaaactgtggttgggggaaacaattttctgctttattgtgtgtccgagtacatacatgataaaagtaaaagccagggaatggaataaaacatagctttatataatatattagtagatacctaaatacaatatggtcttaaaaatgaagtcatatgtatatagttgtattcctaagtatgttagtcccccctcatccacaaatctcctttctgtggcttcagttacttatagtcaaccacagtctaaaacacatgagtactgtaaaagaagatattttgagagcgagagggaccaaccaaattcacataacttttcatattagatcttagtgatgcaaattagatcttactcatacaaatgagacattgaattaagtctttctctcagtctgacccttagaattgtcttttgtaagattttaaaatgcatcaagtaatacttacatatgtaacagctgacccctgagccatcactgacacagatggtaccaggactgctgtgcacagacaggctttcgactctgagtagtagacacaagtttgctgtatttgcagcctccacttgagggcttgggggttccctggcctggctacactgatagcacaactggctttgactctatccccaattccccttcctccctatcccctatgcaaatcccagtaattctccaggtgatatcctggggatttccttgggatattcttggtcttcatcctgccttagagaaaactgatcctcagaggcctcacctgatccagagttttaggtttatcctgacccagactctaattccagggttatcctcttgagttggaggaagaaatggtgatttttaaaagataatcatctataggatcagtagtcagaggcttcatgctgatgagctgtaggaaataagatcaaatggcagcaaaagggtggaatacggaagtttccaaaataataataaggtatagcccatttggttcactggaaattaaagagacccatggccttgaacaatgatgtatgtgtgagttacacacccttcaaagaaacatggtgttatctttgtgtgtctgcactgaatagcttggtcatataacggtaataagaatggcagcaaaatgcccagtcatcgcccaatgggctcatgaacaaagtgatcgcagtggcaggaatggagcttatgcatggcctcagtaaaatggactttcactccctacagctgatctggctgtggccacagctgagtgtccaatctgtcagatgcagagacctacactaattctctaatatggcaccattcccctgggtgacaagcagctacgtggtggcaggttgattacattagaccacttccatcatgtaagaaacagcatttcattcctactaaaatagatgcctactctggatatgaatttaccttccctgaacacagtgcttttgcctgaactatgatccataaacgtacagaaagccaatagtcctaagcaagtttatattctctggacacagtttttagctgctgcaatcaaacatgatttaattaacttaccatgggtaagtggcttctcttccttagctaacaaatgtgccactcaaaaacttagttttgcggcagcctcattttcattttttaattttgtgaataaattctgttatgaacagctattgtgttttaaatttttctaatttttacaaatcatgaataggtattggattttgacaaatgctttttctgcacgtaatgatataatcatatgaaatttctttcctctcaatctgtgtatctttaatttccattatttgtcttattatattggcagaacttgtagtactctgtggaaaaggaagtaagagggaacatcctttccacatcttagcaggaaagcttctaatttctcaccattaaatatggtgttacatgcagatttttgtagatggacttcatgacttgcatctacaagaggaagttctcttctattcttagtttactgagagttttttctttataattaatgagtatgggatttctttaaattctttttctgcgtttattgatatgattatgtatttcttcttaatctgttaatatgatggattacattaattggtttactaatattgaaccagccttgcagatgtggaataaatcccaattgcttatagtatataattctttttagatattgttgggttcgatttactaatattttattgaggaatattgcatctattttcatgagcaatattggtctgtagatttttttagtaatttcttttttttggtttggcattctgattatgccagtctcatagaaacaggaagtattctctcttgcttttctcttctggaatatattgtagagaagtggtataatttcttccttaaatattagatagaattcacccataaatccatctaggcctggtgttttctgttttgaaagcttattaattattgattctacttcttcaatagatacaggtcttttctgattttactatttcttcagtgtgagcttttgtagattgcatttttcaaaaagttggtttatttcatctaggttatcaagtaagtgggcacaaagttatctatagtattcttttactatttttttttagcatacataaaatctataatgatgtcctctttttaattccttgatacttttccttgctctgaagtctggtctgtctgaaattattctggttttcttttgataagtgttagcatggtatatctttctccatccctttacttttaatctatatgtctttatatttacaatggatttcttgtagactacatatagttgggtgttttttataatgtggctgacaatctcttttaattggtgtaacaatccactgatgtctaaagtgattattagtacatttggattgatgaataatgtttgttatttcatatttggtgctctggttctttttgctcatttgtctccacactttttttctgtcttttgtgatttcaattgagcattttgtatgattccattttctttcttttcttagcatatcagtgatggtgatctttttttttgtttttgttttttactttttaagtagttgtactagggattgcaataaatgtacaattaatccaagtcaggttttatttacttttttatgctaatttttttattagaatgaaagctataaataaacacattacatagagaaaacttttaatatatattcctatgtgtagattatacaagtgatgtttgcatacattcttgttattaagaaactacaatgaagtatttagattaaaaagtaaaagtcactcttcatacaccactagtggtctttctactgttccagtgatttaataaaataatttttaattgtttttccaaaatattttattattaaataataatttttcatatttatggggtacctgtgatattttgatatatgtgtgtgtgataaacaaatcaaatgtgtaataaacaaatcaagatatttaagacatccatcacttcaaacattcataatttctatgtgttgagaatattcaaaatcttctcttttagctacttttaaatgtacaatgttattgatagctattgtcaccctatgatgctatcaaaaacttatgccttttctctaactgcatgtctgtacccatcaaccaacctctctttattccccccttcccagcttctggtaactattctactctctagctccataagatccactactttagctcttacatatgagtgagaacatgaaatatttggctttctgtgtctggcttatttctaagtgcacttttaattaacattaaatgtttcatgggtagtgcaaatatgttatgataatagtagctattaatcaaaattctatgtattactgctgttatataattgtgtggcttaataaatcgaaattaaattgaagtataattaattttaactctccagcctgagtattaaaacaggaactactgatgcttaggcagtaagcactgtgagtaaatcattacaaaataaaagcatactcataaacattgtaacaaaacatatcaaggagttattataattctcccaagagtttagaatctccatgtttgaaaattgctgtaataatgcaaagcaattttccacagtattagaagtaaaaactaagtttaaatattgttatatttgatagaaaagaacattattctcatatgaagattcaaattatcaattattattgagaaaaacaatttaaaaattattttttccttgtaatggaggatccagtgatatgatagaatgcataagcagacattttgaattatatgaaagctgatcttgctattcatgttactattatattttcaaagtaataaaatatttttgagaaaattctcttcctgttttaagaagcagccctgcatttttattttgcactggggctcacaaattatgttgttggttctgttttccagtaatacatatcagataccagcaatgctgaagtttggaaactttctagaatgctttttgtttcattaggaagagtcctccacctccatgattccctttgccttctagaagaataaaatgggaaaaacagaattttattattaaaaaaaaaaacccagaagagtaacatcactttccactcaaactgactacactaatctaatttctcattctttatctcttttacactaaggtatacctgtaattttcagagttccattttcaaagactgcttatagtttttaaaaatgtgcatttatggtatagaaagaaaatcattttacgactaccaggttccactgaaaagtaattaatatactgtagtcaaaataaaataaaaattttaatacatgaaaacaactaccgaaatgttatgaaattatagtttagtagaactaacaagtgcattaatgcaaaagaaaagtagggctcagtaatcagggaaccaagtgtgcattgtaaaagtgcagcctctctaacactgggtttcatcacaagtaacagaacaggatgcctgatgcagggaaaaaagaaaggcaattgttggcaatgtcaggaatattgccatggcgtctaccactggtgggttactgagcatcagaaccacagaagaggtaacactgaagcctgcagaataatgagtcttgttgcagaaatgcaaagaaaaagaaagatgataaatgcacacccaggaggttacgttaattttaaccttctgagtgtgcacagctgtgaagataaaactatgcacagctcatgggttaggtttcacacagtctgccatttaaacactccctatgtcaccatcatgtaccatataatttgcatatttgtcctttatataaccctataatatgtttgtggccataaaatctgtgctgtcaaactgattaggaactgactaccacctgcaggtcagggccaaggttatggggtcccaggttcacctcctcagcttcctcctcctttggatctctggtaagagaaacacttcctctcctctgtgccaccaagtcccctgcatatccacaaaaataatatattttcataaggaattgattttcctcattctctgcaaatatgatgcatttgatttatgttttttactttgctccataatcagataccagggcagaaacgacactcacgcagtctccagcattcatgtcagcgactccaggagacaaagtcaacatctcctgcaaagccagccaagacattgatgatgatatgaactggtaccaacagaaaccaggagaagctgctattttcattattcaagaagctactactctcgttcctggaatcccacctcgattcagtggcagcgggtatggaacagattttaccctcacaattaataacatagaatctgaggatgctgcatattacttctgtctacaacatgataatttccctctcacagtgatacaccctgttacaaaaacctccaagttctctcagtgggattgcctcagctgctgctgaaaatgttcagaatgtggaactgggtggccctgtggtgtttataaggcttctccatgcccatgcaactcacttcctttttctttttgtttctgtagtttctgctgcccccatgctgtgcctgacacacttgatatggcaaaaaccaggacagcctttctcacgttgtccagctgtgccaacaatttcacttccaagcagaggtaaattctcatggccaactccctgtcttttgccacactcatcatttccacctccaagaaaaacaaaaccaaaaaccaaaatgcatctagcttagattccaaatagtagcattaaaggaaattgtccctccctataagcattctcaccctcatccacacagtcatcgtgactcttccctaacccactgagtgctcaccagtcctcttcagtcctccctccagtgatggggaaaagcgagtgatagttatgagagcaacatgtaacctgggtgcagactcttactagtcaggtttgcctcagatttcaagtatttatctttcttttattttccattttttttcttaattatatggatcagtaagatgtctcatttcttttttttaagttacttgttcttttaacacaattcaattctataattccaaatttaaagagataccctgtatgtctttggcatgtgttatatctggacaagttttgggttatccccttcatgccactgctcaaatcttacctgaaaccccacatatttttccaaaaacctgaaaactgtgtagcggttgaggaaattaaatttggcaaatcacaatacttgaggaaacatgtatctttttatcttcactctctaatgttcaggtgatgctgtttaattgagcatttgctatttagaatcacccctctgaaacttgtgggaaaacagcaccagcaaggcagtcttcatgttttgacctcattattcctggattatgctagccttcttgctattgttctactacagccactacctgaagaaacctcatgtaggattgtttcctaatgaaatattaagatttatctgcaattatccctaactctgcaaacttaactgacttctcaggttagtatttaatagccatcaaataaggagtggctgaaataatattaccaaggaaggaaataattggatcatagaaatgagggctttgtggttattgcatggtgaagaccaacaaaggccattgcaaccagtaataatatgcacaatgatgagctcgtagttaagagcaatttctgtcttagttttactgtcactgaactgggctggaaccctggagggcagggtagatgaatgataatcaaaaacatgatttcatatgttaagttctttggaaggctcaatttcggagatttctcccactttctataagagcagacatcaaagaatctgattctggaatctcgttttttctcttacagctctctttttttctactctaatctcttttccgcttccaaggacatacattgataaatatggtcaacagaatattaaggtgatgtcaatattagtgactaccctataagagggaacagaaacattcgtgtttgtaagcttttagtcctcacttaagcttctttcttgagtaatgtaatcgctccccttaatgtctggagcagacattagtaagaataataaatagtatgtttagtctcaaagatggtgaatacagaaagtggtcagaatgtgaacaacactattaagtatttagctaaaaataaaactattgagttttgtaaattcttatcaagtcttctctaagattgaagctccaggttttagtgaaaatcctgtccaggaaatattacattataatccctttctctctgttcccatctaccttaggctcatagtgacatgaaagcaaatttccatcctctgggaatatataaacccggattatttctttttatatagatgctctatcccttgcctgtgtgctattttcttactgagtcactaccttgcaccatgtacacaacccccagtggtttatgataggatgaacctattgaagcagctagcagagaaaaggttatttatgtgggtaactgtgtatgcttgttggacattccctgggtctctcacactgttaccacagcagcattataaaaacatcatctatctatctctctatctatcaattgatctatctgtcaatctatctattgtctatctccataaacacacaaacatactcacatttgtgtgtgtgtgtgtgtgtgtgtgtgtatgtatacagaagaaatgataaaagttatatatgtcttatgtcccaaactttagaaaggatatgtaacatgttagcaatctttgaacacacttgctggaatatagagtaaaatactttgttgctggtatatcaaactgtagtagataatccttctgatttccaaacagggtatacaaatgcacctttccaccagcaatgtatgagggtttctattgttctacatgtccaccaatacttggtattgtaaaactttttaatttaagcctttcttctacatgtgtagtagtatcactccataattacgatctgtgtttgtgggattatatatggattatatatgcttgtagggcatttgaccatcctctgggttaaaatttctgtcaaattctgcccattttactaatgcattttctgatttagttgaacagatatgtatgaaaatatatatataacatatgcgtgatatatatcagcgtgtatctgcctatcatccatccatctatctatccatcaatctgaatgtttgtgctctgccaaaattcatatgttgaaatcttaatctcaatatgttgatcaagattgagccttggcaggtaattaggctgttagggtaaagccctcatgaatggaattaatgtctttataagaagaagtgaagagaccagagggctagctagctctctgctcttagccacatgaggatgcaaggagaaggtcctctacaaacctggagtcgggcttcactatacaccagattggctggcaccttgatcttgaacttctcagcttccagaattgaaaaagtttctgctgtttaaccctgtccatcccccagtttatggtagtctgatatagcagcctgaactaacatctgtatctatatttatacaattatagatatagatagaaccagtattttttcgcatttgtctctgtctctggtttacctttttactcacttaagtctgtaaatggaatcattttcttaatttgtttttcagattgtttattgttattgtagaaatgcaacttttttattttctttcctgaaactatatttaatttatttattagttctaatattttttgataagttttttaaaaaaatttattttgttttaagttccaggatatatgtatggatgtacaggatgtgcaggtttgctacataggtaaacgtgtgccacggtggtttgctgcacctatcaacccatcacctaggtattaagccttatgtacataagctatttatcatgatgctcttcccctatcccccagtgtgtgttgtccctccctgtgtccatgcattctcattgtttagctcccacttgtaagtgaggacatgagatgtttggttttctgttcctgtgttagtttgctgaagacaatggcttccagctccatccatttccatgcaaaggacatgatctcattactttttatggctgtataatattccatcgtatatgtaccacgttttctttatccaatctatcattgatgggcatttgggtggattccatgtctttgctattatgaatagtgctgcaatgaatgtacataagcatgtatctttgtaatatgatgatttacattcctttgggtatatacccagtaattggattgctgggccaaatggtatttctggttctaggtctttgaggaattgccacactgtcttccacaatggtggaactaatttatattccaacagtttaaaagtgtttctatttctccacagcgtcaccagtgtctgctgtttcttgactttttaataattgccattctgactatcatgagatggtatctcactggggttttgatttgcatttatctaatgatcagtgatgttgggcttttcttcatatattttttggccacatatattttgagaagtgtctgttcctgtcatttgtccacttttaatggagttgtttgtttttttcttgtaaatttgtttaaattcctggtagattctggatattagacctttgtcagatggatagagtgcaaacattttctcccattctgtagttgtctgttcagtctgatgatagtttcttttgctgtacagaagctctttagtttaattaagtcacatttgtcaatttttgcttttgtttcaattgctttcgatgtttttgtcatgaaatatttttatctgggtatgctgaagaatagttttcctaaaagttatatattaataaacaaagagttagtgagagcactagaatcagagaatatatgtaagagtttgttcaaagcagggtcttaaattttagtctcattgcaaatttggattctattcctcttgaatggactactgaagagatataaagaccatgaggaagcacgaaaatatctgctttgctgcctcaaggatgtttaattgccccattgattctcttgggaaagaattctcccattgttgctcactgattctcaaagattagaagtaaaaataacttaggggatttgtgactaaagttcccatgcctagagatactgacctcctacgtggtgttgagtttaccttaattcttgaaggatgcttaactttgaagggaactctagctatatggctactttttcttatcattttaaggaaattttatggtctctgcttttcctgatttatgtttagaggttagctattaatcttattcttgtttcttcaaaatgagagaattttttctgattaagatttttttgtttgatcagtagatagtaaagtgtgacattatttatacaacgtaacactacacaacaaaaaagattaataaattgcaacaacttgaatttttacagtaaaattaaaatgacacatatctattacctaaaacacatctgagaagctaatttatagaaatagaagtatgcatgtgtaaagatataggtaaaattgtattaacaaatccattgattatattagcaaaacctgaacataatttaattgcccttcagtagaaatgtttgaataaagtataggttttctacacaatccaaaatgtgatgataaagaataggttatatttttcatctcttgatctggagataatctctttagaaatgttaaacataaattcccaaaaatgttaatttatgagccaatatttgaaaacatagaagcagaattatgaaaagtagtaatttgtcttttctatctttacaaatatggaatcattttacatcttgtggggttacaatgaagaaaaaaagcagttatgacaatgggaaaaatgtatgcgtaacatacagcaatgttcacagagatgaatgaagttatagtgacaaatgaaaaatgtaaaaggcaatttgatttatattgaatatatatatgtcaggaatatggaatgagaggagacaggtaaacacaataaaaactctgaccaatgcctgaaataaggatattacagaaataaaacaatgctatttaaacatctaaaaacagcataataatcaccagaattaaaaaagatcctgtagatgtgtgttcattcatagaaagatggaagtccctacattattattaatattttcaccatcagagaaatagggtgctactcagaaaaatattttttaaacaattgacctaaatcatatcaagtaatgagatatttcttgagtccaggcatgatcatgtaaatgcatgttggttaaatccttggacttgtaatgcacattacaactttcagaactcctctctgtttagcatttataggagaccttctgactacatcaaacttcatctaatcacattttacctgcactgagaacttttggtgggaagtgagatggaacgccatagtgtcattgcatattcagaccccaagagggagctgagagatcatgccttgaggaagtgattctgaaagagtccccacagtggaggattccagagctctgtgtgataacattgcctatccactgacccacgccctccccaaatgtgcaaagaaagtccagctgccagaagcccttatcagtgtgcagattccccataatcaacactcctttgcatccaccatatctgtaggggaagtgcagttccaggctcagctcctcaggtgtcttctacccaggtgaaagtccaaggtagatcagtcacaaaatcagtgcaattttaaaattgctttattaaagtacagtgtcaaaccatgaaaagcacctattttaagtgtgcaaatcactgacttatggtaaatttgcaaagttgcagataaccacagtttaatcttacaacattttaatcatcccctgaaggatcccttatgcagaccggcagctatttttatttccactcccagtctcaggcatgtattaatcgactttccctctattgattgcttgatatgaacattctatataaatggaataatgcatgcatggtcgtttctatctggtttctttccattaaacgaagtttaggttcatccctgttttagcatgtatcagtaggccattcctttttatttttggatagtattccgctgtacggatatatcacattttatttatctattcacaggttgaggaacattgaggtcctttgcactttttggttatatgatgatcaacaatgctgctatgaatatttgcctgtaagtctttgtgtggacaccggttttgatttttctcagacagacctctacaagtggaaatgctgagccatatgataaatttctgtttattttttaaaaactgccaaactgttttcaagagtgtgcagcatttaacacttgcaccaacagtgtatgaagccttcttttctgtcacattctcaccaacttttgttattgtctgttttttaaattattaaaatcattatagtgtatatggaatggtgcctattgtgaatttaatttgatttttgttaatgactaataatgttgagcaccttttcatgtgattactgtctgttcatatatcttcttccataacatctatactaaaatattttgttcatttttaaattgggttgtcttatgacttatatattctggaaatatggcgtgtatcagataaatggtttataaataatttctctggtctgtggtttgtcttttcattttcttaatggtatcctttgaaatgcaaatgttttgaacattaatgaaacctaatatattagcattttctttcataagttgagcttttgatgttgtaactaagaaatatttggtgaacccagaaatggaaaagttttaacctaaagtttttataatttcagattttaggaatgggcagaagctggaaacattccccttaaaaactgacacaagacaaggatgtcatctctcaccactccttttcaactgagtattggaagttctggccagggcaatcaggcaagaaaaagaaataaagtgcattcaaataggaagaaaggaagtcaaactatccctgtttgcagatgacatgatcctatatcttgaaaaccccatcatttcagccccaaagctttttaagctggataagcaactacggcaaagtctcaggatacaaaattaatgtgcaaaaatcactagcattcctatacaccattcatacattcctatacaccattcatacattcatacagcattcctatacaccaacaacagttattccgagagccaaatcacgaactcccattcacaattggcacagaaagaataaaatacctagaaatacagctgacaagggaagtgaaagatctctacaaggagaactacaaaccactactcaaagaaatcagaaacaacacagacaaatggaaaaacattccatattcactgataggagtaatcagtaacattaaatggtggctatactgtccaaagcaatttatagattcaatgctattcccattaaagtaccactgacattcttcataaaactagaaaaaaacaattttaaagttcatacggaacaacaacaacaaaaaagtcctgaataaccaaggcaatcgtaagcaaaaagaacaaagctggaggcatcacactacccaatttcaaattatgctacagggctacagttatcaaaaccacatggtactggtacaagaacagacacatagaccaatggaatagaatagagagcccagaaatatgtcctcacacctataaccatctgatctgtaataaagttaacaaaaacaaaaaatggggaaaggacttcctattcaataaatggtgctgggataactggctagccatgtgcagaagattgaaactggacgcctttccttaagccagatacaaaaatcaactcaagatggataaagtatttaaatttaaaacccaaaactataaaaaccctgaaagacaacctaggcaataccattcaggacacaggcacaggcaaagatttcatgacgaagatgccaaaagcaattgcaaccaaagcaaaaattgacaaatgggatctaattaaactaaagagcttctgcacaccaaaagaacctatcaacagaatgaatagatccctacagaatgagagaaaaatttttcaagctatgcatctgacaaaggtctaatatgcagcatctataaggaacttaaacaaatttacaagaaaacaatcaaccccattaaaaagtgggcaaaggatgtgaacagacacttctcaaaagaagacatacaagcagtcaatagtcatatgaaaaaaagctcaacatcactgatcattagagaaatgcaaatgaaaaccacaatgagataccatcgcacactagtcagaatggctgttatcaaaaagacaaaaaataacagatgctgatgaggttgtggagaaaaaggaatgcttatacaccattgatgggagtgtgaattagttcaaccattgtagaagagagtgtggtggttcctcaaagacttaaagtcagaaatacaatttgacccagcaatcccattactgggtatatactcaaaggaatgtaaatcattctattctaaaggctcatgtatgagtactttcattgcagcaccattcgcaatagcaaagacattgaatcaacccaaatgcccatcaatgatagactggataaagaaaatgtggtacatacacaccataggatactatgcaagcataaaaatggacgagatcatgtcctttgcagggacatggatggagctggaggccattatcttctgcaaactaacacaggaacagaaaaacaaacactgcatgttctcacttataaatgagagttaatgatgagaacacatggacacacaagggggaaaaacacacacttgggcctataggagggtggagggtgggagaagggagagaatcaggaaagataactaatggatactaggcttaatacctgggtgatgaaataatctgtacatcaaacccccatgacacatgtatacctatgtaacaaacctgaacatcctgcatatgcacccttgaacttaaaagttaaaaaataaaataagatctctgatctattttgatctagtgtgcatggcaagagatcagggcctaaattcgtcttttcacctatagataccaattgaaaatctatccttcctcccatttaatttcctaggcattattttaaaaaataacttaccaaaaatgtaaaggtttatttctagattctcaattccatcctactgatctataagttcatttttgtgccagcaccatcttgtcctggaaactgtagtttatagttgttctctgctttatagtataggcgatccttggacaacactgatataagctgtgcaggttcactcatacatggattttctgccacatctgaaataacaagaccaatctctcctctccctcctcctcagcctactcaatgtgaatacgataaggatgaagacatttataatgatccattttcacttaatgactagtaaacatatgttctcttctttataattttcttaaaaacattttcttttctctacattacttgattgtaaaatacagtatataatacatataacagtcaaaatatgagctaatcagctgtttatacaattggtaaggcctccagtctacaacaggctatcagtagttagatttttggggattcaaacattatacatacattttctattgtgcacggcgtctgtgcccttaactcccacattgttagagggtcaactgtacattttgaaactggaaattttatgccctccaacttcaattttcttgaaaaattgttttggttatttgaagtcttctgaattttcatataaattttagaatcagttcaccaaattctatagcctactgggattttgactcaaattgtgttgaatctgtagatcacactggagagaattatcatcttaataatactgaatcttccagtccatgaacatgaaatgtctcttcacttatttggatcttctttaatgtctctcagtaatgttttatagttttcagcatatctcttacttttttgttaaatatattcagaagtattttcttcttatcaatgtttgttcattgtctttatgctttattttcaagttagtgatccacagtagtcaatcttatttgtgtattctgtatttgtgaatttgcctgcctgctaaaatttaatacaatcccaaagtcaatacatagagtgcttttattctcatttgtggacatgcacagagtggcaaaaaaattgagccactgaacactcatgttcccaactgaggtttaacaaagccacactcttccatcttgtttcacttctcatactgtaaacaagtgtccttttgctcaattttgctctttatgttggtaattttgtggttataaatgttccccaaatataataatgctgaattgctgtttaatgttcctaagcacaagtctgccatgtgtcttacgaagaaaatatgtgtgttagataagctttgttcaggcacaagtcatagtgcttttggccatgagttcaatgttaataaatcgtgtgtgtatgtgtgtgtgtgtatgtgtgtgtgtataggaaaatgccttgttttattgcacttcactttgttgctctttgaagatactgttttttacaaattgaaggtttgtaacagccttgggttaagcaggtctatcatcaccattttcccaaaagaatatgttcactttgtgtctctgtatcacgttttgctaattttcacaatattttaaatttttcattattatatctgttagggtgatctgtatttagtgatctttgatgttactattataattgctttggggaaccacaaaacacacaaaccacacttactcgataaatgtatgtgtggtgactgctccagtaactggccgttccttgttttcctcttgtcgggcctccctatttcctgagacacgataatatgaagattaggctaattaagaactttataatgatctgtaagtgttaaagtgaaagaaagtcacatgtctctcactatcaatcaaaagctaggaatgattaggcttagtgagcaaagcatgtcaaaagcttagatagaccaaaagctagacctctcgccccagttagccaagttgtgaatgcgaagaaaaagttcttgaagaaagttaacagtgctactccagtgaacacatcacaaatgtctaaaaagcaacatagccttattgctgatatggagacagttttagtgatctggatagaagctcaaaccagccacaacattcccttaatccaaagcctaatccagaggaaggcccaaactcatagaatttatgaaggctgaaagagatgaggaagctgcggaagaaaactttgaagcagcagaagttggttcatgatgtttaaagaaaaaaagccatctccatgacatacaagtggaaggtgaagcagcaaagtgctgatggagaacctgcagcaagttatctagaagatctagctagaagtattaatgaaagtggctacacttaacaacagattttcaatgtagatgaaacagtcttatgttggaagatgatgccatctaagactttcatagctagagaggttcctggcttaaaagtttccaaggacaggcagactctgttattaagataatgcagctgatgacctatgttaagtcgaagccaatgctcatttaccattctgaaaatcctagggcccttaagaattatactaagtctatttttcctgtgctgtatacatggaaccacaaaacctagatgacagcacatccgtttagagcatggtttaccaaatatttgttgagacctactgctcagtaaaaaaagatttctttcaaatattactgctcattgatttacaatgcacctagtcactgaagggctctgaaggagatacacaaggagatgaatgttgttttcatgcctgctaacacaacattaattcttcagctcatgcatcaaagagtaattttgacttccaagctttattgcttaaaaaatacatttcataaggctagaactgctgtagatagtgattcctctgatagatctgggcgaagtaaattaaaaaccttctggaaaggagtcactattttagatgccattaagaaaatttgtgattcatgggagctggccaaaagatcagtattaacagaagtttgaaaaaagttgattccaaccctcatggatgatttcgaggggttcaagacttcagtggagtaagtaaatgaagatgtgtaaaattaaaagagaactagaattagaagtataactatgtaacaaacctgcatgttctgcacatgtgtcccatttttaagaagaaataaagaaaaagaaaagaagcggagcttgaagatgtaactgaattgctgcaatatgacagtaaaacattaatggatgaggagttacttcatacggatgagcaaataaaatagtttcttgagatggaatctactgctgtgaagatgctgtgagcaaggttacaatgacaacaaaggatttataatagtataaaaaaatttagttgataaagcagcagtagggctcgaggattgactccaattttgaaggaagtactactatgggtaaagtgctatcaaaaagtatgtcatgctacagagaaacctttaattaaaggaagattcaatcaatgcggaaaactttattgctgtcttattttaagaaattgccacaatctccccaactatcaacaaccaccaccctaatcagccagtagccaacagcattgagataaaattctcaaccagcaaaaagattactcactgaaggctcagatgattattaccattttttagtaatgaagtattttaaatgatgtacattgtttttaaaacgtaatgctattgcacacttaatagactacagtatagtataaacataacttttatatatatgcagaaacccaaaagtttgtgtgattcactttattgtgatatttgctttattgcagtggtctggaaccaaatctacaggtatgcctatatgtatatgcctatatttaagactttatgagatatatataatctgtttaagatactcatacaaaaagttacctattgatcagttaatgaaaatgtgaccataggctcataggaacataaaccagtactaccactaggaccaatggttcaatatttgttaattcagcgtttgtgactttacagatatctgttgaaacataacaaaatgtaactgtacatggagataaaatttatttctgcatattgcatatcttattgtgtgactttgccaaagttgtttattactagtagattgtatgtgtagtggtgggggacatgtattccttatcatttaatatacatacaggattatattttctgtaattaaaatacttttactcttcttttaaatattgatatactttatttttcatttttttcttgcttgattgcttgacaagaacatccagtgcagtgttgaattgagtagcaagagtgaatatccttgtcttgtttatgacattagaaagaaggcattctgtcaactttaagtagatgttaactgtaagtttttcatatatatcctttataaggtaaaggaagtttccttctattacaagtttgttgagagcttttgtcataaaagagttttgaattttatcaaatatctttctccgtttattgagatgattacattttttatatttactctatgtggcatattactttattgattttcagatgttaatctatcttgcattgtttaataaatcccatttgtattatggtgcataatcatttctatatgctactggattctatttagttatatcttttgataattttttcacatgcattagtaggggatattggtctatggttttctttccttggaatgtctttgcttggctttggtattggggtaacactggcttcatagaatgagttgggaagtattcttttctcctatgtatactgaaagaatttaatgaagattggtaatatttattctttaaattcttgatagaactcaccagtgacgccatgtagtctcagtttttctttattggaaactttttaatttcttcacttgttatggttctattcatattttctatttgtttttgaattagttttgggttatctcatctaaattgcctaatttaatgacttattattgttcatcatattctcttacagtatttttaaagtttctgtaggataggcagttgtaccccttatttcaatcctgattttaataatcttggccttctctttttttcttcaagagtcataaagatttttaattttgccaatctttccagaaacacaacttttgctttcaatgattttcgtcttttacttcattgatttatactctatttttaaaattattttcttccttctgcttgctgtgaatctcgctggttcttctttttctagtctcttaaaatagaaactaccccattggtttttagatattctttctttctttactatacaggtaattacaggccaatatttataaaattatttatttatttcaaatcttccactctatagatgaaaccttcaccacttcgtcactcaggaagcaacaggagaaacatgagaagctgggatgaaaacaccattttgaggaatctgtttgtctgatgctggtcagaacctattaccagaggaagcttccttatttaatccccttaggacaggggccatttgagagaaagagaataaaaacaaacaaaacacttaggcaatatgacagttttagtggacaaccctaggttggccccatgatacagaaccactggtgttcctaactgtgtaattccctcttcttgagtctgggcagaatttttgacttccttctagcatacacaatattgcaaaggtgaaagtattttgcagatgcagtagtcccaaatcagttgggtttgagttaatcataagggagattattgtgagtggatctgacttaagcaggtcaaagccattaaaagaggaactgagctctccttgttaccaagaaattatcctagctggtttgattattagtagcccatgtggcaggaaacttaagatgttctctaggagcttagggtgatctccagccaacagccagcaaaaagccaggaccctcagccttagagttactatgaaaacaattctgtcaacaacttgaatgatcatggaagcagactctttaagtccctggatgagaatgcagcctggtcaacaccttgactgcagcctgtgagaccttgaagagaggacccagataaactctgcccaggctcccgactcatagaaactgcatgtgaattataaacgtgtattattttaagccactaagtgtgtgataatttgcatgggccaacagccaactaataataaaattttatatgtagtgagatagggttacaagggttacaaatttagaaaccaatgtaaatcttattagactgaaatgctgcaaaagcctattttgccagagtttctctgcttgctttgtggaggatgcagaagactgacggaggccaaggtagggatggaggggcacataatcactaatctttccatgattgtgactatgcacacctgcatttctggagtccactctgcctgtagtgttagagcaattagaaaagcaaaaagagaagatgagaaaaaaaaccttaacaatggacatggaaaatatcatagaaaaaggacatgacctgtaatcccagcactttgggaggccaaggcaggtggatcatgaggtcaggagttcgtgaccaggctggccaacatggtgaaaccccatctctactaaaaatacagaaattagctgggcgtggtggcaggcacctgtaatcccagctacttgagacattgaggcaggagaatcacttcaacctgggaggtggagactgccgtgagccaagattgtgccattgccctccagcctgggtgacagagtgagactctgtttaaaaaaaaaaaaaaagaaaagaaaaaggacatgaacactgcatgaagagtaaaggacaatttattaaaactagagctgagaatctaacttttgggaaagtcaccgagatagagacatctaaattaaataagcagagataactacctcacaagtcttaggtttctaaataactagaaaagccttttcatgtgggttcagcaaataaaagtggagaaaagtcaaaattcaggtgagaaggtcacctatatctgaaagatatagagctaataattttgactattcagagcattttttaaaatgactacaaagttttcttaatgtttaaaattcttctattggtaagggtctttgacataaaaaatatacattgagaagtagaaaacttctgagaggtcctgatacagtaaagaaattattaaattataaaactggctgtgacacacatgcatgcacacacacacacacacatcaatttaaggattttctctttgataatttgacccctttgttcaaacaagcctatgacagcaggctgatggacctgcataaaaagccacatctgagggatttgagcctcagggagcagctgcctggggaggtttttgtttagacctaaagcactgtgggaggaaaattcttactctgcagacagtaataatttgcagtatcattagcttccacaggattaattgtgagggtgaaatcggtcccagacccactgccgctgaacctggctgggaccccagtgtctttattggatgcttggtaaatcaggagtttaggaggttgtcctggtttctgctgataccagtgaattaagtttattcccaagaaactgacactctcactggctctgcaggtgatggtggccctctgtcctggagacacggccaaggaggctggagactgggtcagcacaatgtccccattgcagcctgaaatgataaagacagataaattatatcagatatactgagactgtccccatgtaggcccatgcattggtgacacttgtaaccacagtcatatgcaacatcttgagtaaccagaaaacaaaagataactggggaacttacaacctacaatgagtgccctaaatccaacaaccaagaatccagagacacaaaaaacaatgatggccacatgagtttgcccgatgtttccctataccccctcacttggagcccagagcaggaggatccacagcaaaggagccccggaccctatctctgagagctgaactagaggctgctcctcaggggccctgacaagctgtctttaaggatgctctgagaagcttggaccgttgtctaatggcccaacatgcaaatcagctcagaaaagtttgagttgatgctcaaaggggacacctgctcttatttcacccagtgggagttggggctaacaaaacatttcctagggtagctcaagcatgtcccaagggatttggtgaccttttctattggatctttgcctgccagtctacttgagatgccatgtggaggagtgtactggggctgccctgccatttggatataagttatttcagaaatacttttgatttttcaaaattcatattttatatcattatcaataataatgcattttaagttatcattgtcagaaagagaaagcaagttgggtgggttttatgaaactggttcatatgggaaggagaagtttgttccactgagtaagtggtatttaaaacaagtctataaatgttatcatgatctggaaaggatgaagggggtgagcatgaaaccttgatgaagactggtaacctaaactaatcaaggaacttgcctcattgtggataaggcagggtctctccatctgcttagtcctgaaaccaatgctgtatccaccagaggccctcagaggcagaagagtcattgtagtggatcctattcagagtggagaataaccatcccccaactcccactggttccatctgccttgccactggaagctggggctaaggaagtccatcttctcctacagcaagatatggtgtccacaccagtcagctggcactctcacccatccataggtgaaggttttcccccaacaaaaccaacttaaaatgtctggaagaagggactgcatcttcaaatgtgcagacaccaacacaaggctacaaggaacatgaaaagtcagggaacatgatgccaaccatcacttctctatgagctccactccaggactctattctgttacttgtgatggagttcagggccagagaggtcccactatactgcttccaactgtgcgcttgggtccctgattactcagttatatttttcattgatgttaacatgcatattagctctagttaactaaaagttttcttttatcactctgggaattgtttttatgcttttaaatttttattttatttgatttcaactaaaataaactagtggcttcccaaaggatctaggtagaactaaaataatggtctttctacaccttaaatctacatttttataaacagctgaaaatgaacagctgagaattacagctacaccttagggcaaaggagatgaagagcgggaacttagattagtgtggtgagtttgagtggaaagtactataccctcttgtttttcctaaatgattaaattctgcttacctagctctattcccctagaagaaagcaggaataatggaatttgagtattccttgaaaaaacaaagaacattttcaagaaatttaagaagttttcaaactttaacctttcagatgtctagtagatatctctggaaaacagggcaagcatcaatttgtggattgagaagaaagataaaatatttcagaggagccaatatgccatgagaaaagtcctgaaaaactccccctgaacccttggaacttttgtgccatgattagggttgggacaatccctgagctttgccccctcctacaactctgggtggaggaggacagaagtagaggtgggaagtaaaaggggtgaaatttgcatttttttattaggccacctagatgaccgatcattaagaaggctctagaaaatagagacaaacttgaccactttaagttgttcactgtcccatcctctgtcttctactctttctccagcaaccaagtgataactactacacacaacctgcaaggatacagtcctcagactcagatctggggtggaggtagggaaggtaataataaaatgcacccacatgtgtttggagcaatcaagaaatattgaactataccatattttggcaaataaaagacttgggtaaagcaaccccatcaaggataagtaatttgaaatgaaataatactgaaaattacaaatataccatgggagagggctatatgactgacaaaaatacatagcaagtaaataataaattagataactcttctgaaaatgatgtactctagtaaaacaaaagtattttctgcagcaaatgattgtaaatttagaagacacaccaaaaaaaaaaaaaaaaaagaaaaacacttaaatttattttcaaggatgagatagcaagaaaataataggtaaaataaatgtgtctggttacaggtacaggattaaaaaagtaaagcagaactagtaattttaacatagaaaaaatgtaataaggcaaagaaataaatggagtcaaagacacataaggtaagcttagtaaagggataaagttcagaaaaaaaggcaaaaaaaattacagataattatagaaaggatagaaaataggcacccaatatacatggataattgatgtgttttaattatggaatttaataaaatggcatatgaaataaaatgtaataacataatgaccagaatgtcaatatgtttaagtgaagatatgttaaaacaccccaccataacatatatgtgaattacatatttattaaatacagaaatattaaaagataaatctataacaaagaatttatatgaatatatatctgactttgtatttaaagagactatttataagccagaagaaaaaggaattctaaaagaaacaaaaaaatataaaaagaaagcaacagaagcctaatataaagtttctaagtagaagttttaaatcaatgtcaaacacaaaattatacactgaagaaaatcaatacatgtaaaaataaaagtaaactataacaatcaaagacatctcacaaaatgatgaagaaagcaaatttaaattagaaaaataatccataaaatgaaaaattaataaattggacctcatctaaattgaagtttttgatctgaaaaaaaatctctattaaagggatgtaataaattgaaagtggacttgtgtaatttagcaaatgaactcttgagcaattatctcagagaaataaaacattattatacagaaacttgtacacaaatgttcacagaagctttatttatagtagctaaatcaaggaaattacccaaatgtctttcagtaagtaaacagttaaataaactggggtaatccgtattatagaatacattcagaaataaaaagcaataaacaattgatatacccaactttgatgagcctgaagggtattacgccagtgaaataagccaatctcgaaatggtacttattgcatgatgtcttttatgtggtgtttgccaagggttaaggatggggtagagaaggtgagtgcggctataaaagggtaacaccaggagtcgtgtggtgatgatttagctgaatttcttgattacagtggtggttatagaaggtcacataaatgattcattcacatcgagctacacacacataaacacaatcacataaacaaacaaaaattgtgtgcgtgcgtaacttgtgaaaactgaataagttctatggatgacaccaatgttaatttcctgtctttggtattgtactatagtttgaaagatgtcaacactggaggaagttgccaagatgtatgagacttctgtatatttctttgcaacttcctgtgaacctataactatgttatagttaaaaaataaaaagtaaaaaaaatcttaagctttattacttgaaaaccttgaaaaaaatgaattgccctttttctatcaaatgattggcaaaaaaacttaaagccttatgcctccctctgctggtgggaatggagagggattgaaaagccatactttggtggttgcaatgtggatttctactgtttcctaagtaatctctgctcactattggagtgaaatttaaaatacgtacacttgttggcccaaacttactactaagaaaattgcctatagaactaataactccgtgttgtctaaggaaacatctgaatgcctatcagtaagagatggctaaatatattgtgctattttcatattatgaaaaattatggctgcctctgcctctgcccctctgcccctctgcccctctgcccctctgcctctctgcctctgcctctctgcctctgcctctctgcctctctgcctctctgcctctctgcctcactgcctctgcctctgcctctgcctctgcctctgcctctcgctctccctctctgtacggtgtccctctgatgcccagccgaggctggactgtactgccgccatctcggctcactgcaacctccctgcctgattctcctgcctcagcctgcctagtgcctgggattgcaggcgcgcgccgccacgcctgactggttttcgtattttttggtggagacggggtttcaccgtgttggccgggctggtctccagctcctgaccacgagtgatctgccagcctcggcctcctgaggtgccaggattgcagccggagtctcgctcactcagtgctcaatgttgcccaggctggagtgcagtggcatgatctcggctggctacaacctccacctcccagccgcctgccttggcctcccaaagtgccgagattgcagcctctgcccggctgccaccacgtctaggaagtgaggagcgtctctgcctggccgcccatcatctgggatgtgaggagccccctctgcctggccgcccagtctgggaagtgaggagcgcctcttcccggccgtcatcctgtctaggaagtgaggagtctctgctcggccgcccattgtctgggatgtggggagcgcctctgccccgccgccccatctgagatgtaaagagctcctctgcccggccgtgaccccgtctgggaactgaggagtgtctctgccccgccgccaccccgtctgggaggtgaggagcgtctctgaccggccgccccgtctaagtgaggagcccctccgcccggtagccgcccagtctgggaagtgaggagagtctccgccctgcagctgccccgtccgggaggtggggggcagcccccgcccggccagccgccccgtctgggaggtggggggcgcctctgcccggccgccaccccgtctgggaggtgtacccaacagctcattgagaacgggccatgatgatgatggcagttttgtcgaatagagaagggggaaatgtggggaaaagaaagagagatcagattgttactgtgtctgtgtagaaagaagtagacatagaagactccattttgttctgtactaagaaaaattcttctgccttgaaaaaaaaaaaacagaaaaattatgcaatttttgaaagaaagggttaatttcatacaattgatctgtttattatacaatatcaagtgtaaaagcagaaatacaaaaatgtttttataacacgtaatccagtgtttgagaacctacaataataaccacagaactatagcatacacaatatagtaaatttttttcatatattaaatatgattcacgtttcttggggtgactatagttttctcactaatagaagaacagtaagttgattaaaccaaaaatcatgacacaattatatagggaggaagtcagagcactctgttcttaagctctgctctagggagaaactatttaaccagcctaatgtgctatatacagttttattattatctaactgactggggaaagagaaatactcaactccatccagcactagcatccagtcccacctacatgggtggagaaagaagcaaagagacacttgtgatgtttacagtccacagacataagctcactaaagcactgaaccctaagcatagaagtatagaatgtttctcttcccctacaccttacccccatattattaaaggcctatttctagcacttcccttcacccaatatattttatctggctatcaagtaaaaattataaggcataataaaaggcaaaaagacatggtttgaagataacaagcaagcttcggaaccagacatggcagggatgttgtaatttttaatagaggagcaatgtaaactgaaagatgaagatcccaagaaaaagcaaaaaaaagaaaatgctagagattaaaaaacaaaactaaacagaacactgtaacagaaaggactgggtatggctggaaaaacaaagtctgatcttgagagtatattaatagaaatctccaaaactgaagagaaaagagaataaagactgaaaaccaaaggcccaagaactgtgagacatatacaaaaggtgttacattgtttaactctttttctctttagaaaaaaaaaaaagtgcagtttgctgccagcattcatataattttacataaacacactctttgaggctgaagcaaatctgactgattttcaatgtgaaataaaatataaaatccgttcttggaattatttctaaacagaacttgtctctaatcctaatataacagaaatgtatatgataatcagtatttaataattttttgtgtggtaaatttcaaagcacagaacaacataaagcggaatatcacattccacacaaaaatatcacgtttctcttcagattgtcttgctaggctcgtctttgcacaagcagcaaactttgcagtgaccagttggatttcgctcccctgatgttggtgatatctcttggggaaaggtcttccatacaggtgaagaggtatgacatcttcagagcaaggatgacctggaagactttgctgccctggcctgtgatgctttaagagcattttttcaatcaacgtcagtctgaagtttatatggctaattgtgtgctcaggattgtccttcttgaacagggtgtagaggttcattcagcactgtaatgtttagaaggtggtgaaagaatttcttagaccgaatcttgtgccctttgaagaagtgagcatcaaatcagctgagtccactgctcccatcttctcactatagtccacagtggcatatgacttcttagttttctctccatttctgttgtctacttcaatcacagtatcattgtggaatgttgaccacattctcaccttcttctttttgaggtaaacactgtagctgcaagtgctgccagcaagtattcttgggcaaaaggtaaatgggttaatggacatgaagaaaaaggaggaggacggggtggaggcgtggtaaacaaaaccatattgagtgaaaatttttctaaattaatgtcagatatcgaaccacagatccaagaagatcaggaaacaccaagcagtataactgccaaaataagcaaataagcaaaacaaacaaacaaacaaaaacaaaaaacacttgagcatataatttttaaactataggaagtcaaaaacaaagaaaaagtattgaaaaggagacagagagagagagagagcatgaacataagagaaacaaacctttcatgtagaggagcaaatataaatattgcatccaacttcttctgtgaaacaggaagcattcttcacttcaatgcaagcaagaggagagtagagtgaagtatgtcgtgttgagagaagaaaaccaccaacctaggattctgttttctatgaaatcatccttcaaaaggaaatgataaatgatggctttctcagacaaacaaaaattcagaaaaatttgttgccagtaaacatgctttgtaataaatagaaaaagaaaagttcttttgagagaaggaatatagtataggtcagaaatttgaatttacataaaagaagagcatcaagaagaaataagtgagggaaaaattaaggaacatatttttcttattcttaactgatataatttttttcaaaataatagtaatgtgattattatgcatgctgatgtatacatttacatatataaatacacacgtatgcacatatatgcatacttatttatacttacatataagtgaaatgaatgacaataatgcaacaaatggaaaaaattaggaatactttgttattatcaggtactcacatgacctatgaaatggtataggagtatttgaaagtaggcttggattagttgtaaatgtatattgaaaacttcagagcaacactaaaagaggttaaaaaatctaatatgctaataaaggagagaaaatagaagcgcataagatgctaaattaaaaccataaaaaagcagaaacaagtagaagataaacatagaaaaaaaacacaccaaacaataaatcgaaaacagtgaaagtgtggtagacattaatccaaggcattgataattagttggagcatcaagtgtctaaatgtacaaattaaaagatatgttattagagtgtatcaaaaaggaagattcaactatatggtgtctataagaaacctaattaaaatattaaagcacatatagattgaaaagtatatgaatggagaaagatataccatgctaatattaatcaaaagaaagcacaagtagctatattaattttggaaaagaagatctcaaagcaaggaaatttatcatggacagaaagagcattacatatgaaaaaggggccaattcttcaagaagacaaagcagtgcttaacatatgcgagcttaacagcagactgtcaaaataaatgtggcaaaaactgatagaactacaagaaggtacagctgagtccacgattacagttaaagactttaacacttcactatcagaaatgggtagatccagcgggctgaaaacccataaaaacagtcaaactcaacaacactatcaatgaactatgtataattgccatgtgtacactattttgtccaaacacatattttttcaagatcacatggaatattctctgtgataaacttaatgccaggtcataaaacacacagtaacgtattttaaaaaaatagaaatcattcagtgccttctctcaaaccacaatggtattaaaatacaaatcaataccaaaatgtagacaatacccaaatatgtggagattaaacagcacacttccaaataacaaaagagttaaagaagaaatctcaggagaaatttaagaagattttgaactaaatggaaataaaaacatgactcatcaatatttgtggaatacagcgaaagaggtgctgagagggaaatttatattatcaaatgtataaattagaaagaagaaaaatctaaaatcaataatctaagctttcactgtatgaaagtagaaaaagaagataaaattaaatctaaattaggcagaagaaaggaaataaatattagagcagatatcaaaaaaattgaaagcaggaagtcaacagaaaaaaaaacattaaaagctaatactataaaaatacaaataacattgataagcctcaagccaagctaaggaaacacagaaagcacacacattgctaacagcagaactgaaagaggggacatcactacagatcctatgaagcttaaaaggatactgtacgactattataaacaatgctatgatccaaacttgataactttgatgaaatggatgaagtccttgaaagaagcaatctaccaaaactaactaaaagaaatagacagtataaactgccctatatatattttatatatttaataaactgaataaataactaacaacctttttaaaaataaagcaccagattcagatggattcaatggtgaattctaccaaatatatgaggaagaaattcttcaaattctccatctatttcacaagatagaagcaaagggcatacctcctaagtcattctgtgagggaaatactagtctactaacagaaccaggcaaagacattacaagaaaatagaactacaaatatttctcatgaacatagatgcaaaaatcctccaaaaagtattagcaaatcgactatgacaatgtataaaaaaacactatacagtatagtatgccaagttggatttatgctaggtatgaaaggctgattcagtagtcaaaaattaattgatttaatccaatgttaattcttgtgcatccaacacaattgagtatccagagaatgggatattatttatagcctaaataaacaagctatcaaaccacgaaagaacatggaggaaatttaaatgcatattactaagtgaaaaagtcaatctgagaagactgcatattatattatttcaactatatgatgttctgtaaaagacaaaatcatagagacagtgaaaggatcagtggtagttagggatttgggagggtgggggatgaatgggggaggtgaacagagaatttttagggcagtgaaactgttatgtctgatactacaaagatggatatttcctattatacatttttcaaaacctataacatgtatgacatcataagtgaaccctaatgtaaactaagaagccctaatctaaactctgggtgataatgttgtgtcaatgtaggttcactatggtgggggatgttgataactggggaagctttgcctgtgtcagagaaagatacgagaatctgcactttcttctcaattttgctgtgaacccaaaactactctaaaaatgagctctttaaaaacataacttcctcccctgcccggccagccgccccgtccgggaggtggggggcagcccccgcccggcagccacccagtctgggaggtggggggcgcctccgcccggccgccccatctgggaagtgaggagcccctctgcccggctgccaccccgtctgggaggcctaccgaacagctcattgagaaccggccatgatgacgatggcggttttgtcgaatagaaaggggggaaatgtggggagaagagggagagatcggtttgttactgtgtctgtgtggaaggaggtagacattagagactccattttgttctgtactaggaaaaattcttctgccttgggatgctgttaatctataaccttacccccaaccccgtgctctctgaaacatgtgctgtgtccactcagggttaaaatgattaagggcggtgcaagatgtgctttgttaaacagatgcttgaaggcagcatgctcgttaagagtcatcaccactccctaatctcaaatacccagggacacaaacactgtggaaggccgcagggtcctctgcctaggaaaaccagagacctttgttcacatgtttatctgctgaccttccctccactattgtcctatgaccctgccaaatccccctctctgagaaacacccaagaatgatcaataaatactaaaaaaattaaaaaacaaaaaaacaagaaaaacataacttcttaaaaaataattagttatttccactatctaatacagcaacttgaattgtgggagaatgagtaacagtgaaagatttgtcatattttcttttattataaatcaattattaaaaatattattcttacaaaataatcttttttgaatttcagagtattgctattgccagtaaaagttaatgataaacctttaaaaagtctgccttgtaattggttattttgtctcaaaatctgttgcccttaagtatccagaccatgtaaacttttgtaagaattcttctttcatcagaaaaaggctttgaaattttcttatactatctgggagtataatattcttaattctaaatgggaacctcccctttctgtatgttaacataccgtgccaaaatgttgacaacagcagctagagtggatcactccacactggacaaagataagaattgataaagtttgtaagaacagcctatgtttagatctaggtgggaagcaggccactgtgtgtctccaatcttggtcacattcaactgcatgaggacagacttatataggtcagttttcttgtagttcaactttcttgccaaatcctgtttgggggtccataagtgtaaaagcacatgtaatatatatacatatataatatgtatgtgtgtgtgtaataatatatatattacatgtatacatgtatatatacatgtaatatatataccttatatatattctctctctctctctctctctctctctctctctctctatatatatatatatatatatatatatatatatgacttgggaaagaggagtcttggaagtggaattgcttgtgtccattaagctggattcagtgttcgtagggtggagtttgaccctatttgtaggggatttgggggcttatcaaggaaaaagaggtgaccacagagtagcagtagcacacacatttattgggtgaaactttgaggggctcacagggacaagtccttcacagcaggagtctttgcagatgtgaaggtgccaggttgctattcagaaaggaagggaaacaagaaaacacctgaggaaagggacactggagaaaggggcttatgtgtctaggtgatgtcacacagcagcatgatggagagcctctgggttagaaagctcaagaggacagttgcagtttgggggttttattgcctgaatcttactttatttattggcagcaggtgaggtttcctggcatatgcaaagcaagcagtgtctaaatggcaaaataataataataataaaatttgagggctatttttgaaataattagttgtgtaaaatttgaacttgatgatagtagtttaaaaataaacctgcagtttagcaatacacaactttgagggcagtaaacagagctttgattcatttatataacactgttgcacatcctataatgtttgttctgttgactttatcaacccaaactgtccaaacctataatgctttgcactagaatacatacccagatgtgtggttccttcccatacccaaatggaggttccttatggcattgattgtggtgatggattcatgggtgtgtactaattttcaaactcatgaaattgtgtacattaaatatgtacaattttttggtatgtcaattatctcaataaaatggttttaaaaatctcaactagcagagggatattccccaaatgcagattgtctagagtggattcctggcttcaagacacttgtaatgaaagctggttgtctcttctaaataactataaattgtcacccagaagaagtaaaattcatggctaaccattctgttttacaggttcagagcaggctttgtggatgtgtttatcctccgaatttatatattctctctaaacactgggagacgttagtatgtttacatgtctgacttctctgggttgtcaagatcccatttttgatctacctaatatgaatttgtatccaaatgtttaaattcttttctttccttttacttgaagtaaatactaaaaaatcctacagagatactcaacccaaccataaaaatgagtttgagaatcatgtgttggcgatgaaggctttttatctgtaaatgctaaactttctgctgagcccagctcacccatggactaactggataaagtgagacaataattccattgtctacctgagcattccccaccttaaaatttttaactgcctctaacatctctgctctaggcttactcttgaagacagggtcctctatcttgaaaagaagtttttctcaaaagccagagcttgtttaataattttcagtttttttaatgtgagatttgtctattccaccttgtaagaaaatttgatttgccagacaaatgaaaagtggaaaactcaagaagagtttagagatagaatcaaggacaatagcattttaaactgtgggtacatctgtctttgaaataatttgtataaatatacggaaatgacaaagtaaataatttttttgtatttttaatttagataagatagtttacttgcagaaaaatggagactatgaacctggaattctcaaattcaatgttttttcttccggtttaaataatttcaagaatctataaaatacttacataaactttaaatacagaaattttaagagcttcagaaaaaatcgaccaaattaaatcccttacactagtttctgaaatcaaccaaaattgtgttttaactactgtgttttatttccaatgaacaacaatcaaaaacattagataaagtaagatgcaataggtgaatgaattgtttggtggtcactcttagttataatgagataataatgagacaatatcttcatcagaaagtggaaatggtgactttctgccttaagggagcaggggactcacagttgtaaacttcccctccgtcttgatctttcttgtgcaggagccgagggtaatccactgtttcagtggtctttgagcagcaacagtcctcatctttctgtaattctagaaatgctcatactgggctcttctaaaacactttttatgctaaatagaaaaataaagatcagtaataaaataaaaagaaataaaataaaataacttatgaactcctggaagtagttgtgggataaaattataaagtttaacaaaaaactagaacctagaacaacttactaaaaactaatttagtcaaattttactcttattttgtattcttgccctcacaaattaggaattttctcaacccaaagaatgattgcctttcttatattctggaatcttaacagccataggagaaatttgaaactatgagaatttatactaaccagttatcctaggaaatctggttacacaaaaattaactatttagagtaaaataaaaggaaaaatttgttgatcccatggaaataattaactgaatatttgctggtcaataaagctaatcctaagtatgcccctaaataacagcgacatcgttgtttctggattaatgctaagttttcaagatccattaaaagtaatttgccttggattcagactcatagtattggtcataactgtaattcaactaccaccagaacttgtagaagacaacaacaaaaaagaaggggtaatgagaaatatgttatgaaatgtatcccaatgttaacatttatgaaggagagggaggtgttttatgaatatctattctcatagcactgatatcttcaatttgataagcaaatacaaatctttaaaccagaatttggaacagggtaaatatggctctcatgaatttgacttgactgcgtcctggggttgtattgacataaggactagatggaggtacatacagcagaagtaatgaaaattataatgtcaaattttagagcctcctaactaaagcactagctcagatactgtataaagatgaaaaaaaagttatgtgaaaatgccctggaactgtttctggactgcctagtaacatcctggctgtggttggatggctgatttaccccagctggaagtatcagtattgtacagctgaaatttgtgggcactctcctctgcagttgtcaccaaatggcttatacttttattttcaaaatccacttgcaattctaagagctctccttttctctcacaaaaggcagttgaggcaaatcaaagacttttgggataaaatgttatctccactatgaattgacaaagtctatttagatgtttgcaaactaaacattttcactaattgctgtgagtcacactccccctgagtatagcttgtgtagaatgcaatcacaggtatgtaagtggaggtttggtataaccactaatggagaggtaggaagttagaaagtgggaaaataccaatttctgaatattaccaaacgttatcgtgttaaaaatataacaaaacctgctaatcctaacatatacccaacctttgtagccatgagtaggcctcaattttcttgctgttatgctgactaaatctcattgacaaatgcaggaaacacagggaggatcagaatgcactttccaggtagctctctcttctgtcatgtctagttgctcagagagcactttgatcaccttcattcttctgcttgagccatgtgaaataaggctgttacagtgatggggccagaacagtctggatcttcctgcaaattattccctgcagtcatctaacatctacctgtgaagccaactcagaatctgccatgcagacagtccacgtgcaaacacttgtggatggctgggccatcccaagtagggaggtttgtgttcagggttttaccactgtgtgaggaccttgcagaccctgttcacagcaataaaccccaacatcctcagcctccactttgctgaatttaagtgtgaaacctgtccctgacctgctgccactgaacttgtttgggactccatagaatttgttagaaattgtgtagataagaagctgtggagactggcctggcttctgcaggtaccaatccaaataggtgtttccatcactatgcaggaggctctgactagacctgcaggagatggaggccggctctcccagagggatgggcagggagagcagatgctgggtcatcacaatatccccactggatcctaaaataataacagtgagaagtacaaggttacatacaaacaatgtgagacatttttataatttagttttattgtatacgttaggctacttttttgtgtttgattagattcatacactacatttatccaatatccaaaaataatccaataattaaaggcacaaagtggcctctttgtttttgaagttctcgacagtgaagttctttttccttgtggctcgttcttagttcttacaggtctgaatattaaattccctttgctggaggacaagaaatctgcatctgacatgtagacagaacaacaaatgggaggctgcagattccacagagctcaccctccagtcccattctcctctcttctgtccttaccagggacccagagcattagcagccccaggagctgagcagggagcctcactgtgagaaggtgaactgaggagtcctgatcagtcaaggcaaggttagagctgagcttttatctcagactcacaagggaaggtcttccctaggggacaacatgcaaatcccctggtgagtgaagcagtgaagaaatatccagttggggtcgaagagtgggcttcttatgtaagcaaagtgacacagaatatcttttgtgttgatgaaaccaaaataaaatattggtgttgcctggcttagaagggtgacattctgaaataccatgaatcaatgtggaagacactgtgactgcagcctgtcactcttcattgctgatgcaatggagattgtgatgatgaagatgtgtatcaatctttaggtggtgaataggctttcttcttggctccacccagctaattctgaggaggaactagctctcactaactctggtgctcattgatagaatgtctctaagtatcaggatgaacttgaaacagttccagggttatttggctgtggttgcaaggctgatttccctcagcttgtatttcactgtagctggtatttctgggcacttggctctacagctgccattaaatggcactaaatgatgccccagtgaataagctagctgtaatgtgtgcttcgtaaacaaggagaaaattagagttcacgggaagaggaatgcatattccattccattgtatctaatgcatgtcgttgtctttgaagggaggaaggccttggtaggcctctttggattctagaggcaagaaattctgtaccttggaatactgtactggctcactgaccgactgatacacgagtcagccagccttgagtgggacccggggcaaaaaaagggctctgcagcaggttcagcctgtagcacaagcagtcctgcctctcaggccagtgcagatgcagatgaattggacagcacaatcaaccatctggacataattgacacttcgagaacactccaccagcacagcagattgcataatcttttcaaaaaatttactaaaatagaccatattgttaccagaaaaggggattttgattcaaactccaagagaggattcttggatttcatgcaggaagaaattcaaggaaagttggaaagtgcagtgataagagagaatttattgaaaattactccattacagagtaaggcatcctcagaaagcaagcagaggaacataccgtctttaagtttttcttatataggagtgtcgtctatgtaaagactaaactaagctgtgcctacatgcggatgagcagacattacgacaaaatttattattctgttgatttaagggaaactattcttgacattctagtgtgttatcttggaaataaggactgtgtcttgcaaagaaacatattcattggggcaatgtgttatcaaaaaaaagattttatctacttatgatccaataatttagactgacttcaacagatttttttaatgacaaaaagcagaagatggtataagaggaaaatacaatacaacagaaaacacaagctattataactcttgcttcatggatttttacatatctattagacatatgctgggtatatgtgtgcaatgataatctaaaaactggatgctaactagcttaaggaatgcctgcattacactgagtcttgcccacttttccaattataaacagaaagctacagtactatttgtatgagtatcaaaacttttagctgcctgagatagaggtaaagaagatttactgagataaaagccttggaagtagtagagatttgtcctatgatgttatggctgttgctgtggttgccgttgttaggaaatacagtgggagtgaaagcaagattgacaagctctgctcttcctcatactcacaaccccctctagagatggacagatggtggtacaggaatctctgacacctcttagaagtcttttgctctttccagaatgtttcctgacaagtattgttttgagtcacagattaggtgaaactgggtgtagaagaaaggactagagcaagggaagaagttttccatcccagatagttgttgtaggaacagggaaatggaatttttcatagatttatgccacatttctatcatgttggggagagaggcatcaaaccaggctcattcctgaaagaatcattacattattttagagagaaagaactacaaatttcttgtcaaatagatgtttaaaattcaaagctactgatttttttttttttttttttgagatagagtctcgctctgtcatctgggatggagtgcagtggcacgatcttggctcaccacaacctctgtctctctgattgaagcaattctcctgcctcagcctcccaagtagctgggattacaggtgcaggccaacatacctggctaattttcgtatttttagtagagacggggttttgccatattggccaggctggtctgaaactcctgacctcaggtgatctgtctgcctcagcctcccaaagtgttgggattacaggcttgagccactgcaccaggccctgctgatgtattaatattattcatcttcttgaatacaccaaatggtaaagtgcaaatccacactttaaacttgagatttctactcctatgtaaattatactagtgaggaacaaaaaaattctctattggttgggagatgatgtttgacagtggtcagtttgtgaagtggaggcttacgtcacagtactttttacagtattgcatataaacatgaatgtcctcatacccagaagaatcagcatttctcatgagccatattaccaccaagaaagaagtgaattgaagcctgtgactacttgatgaagggtgtatagaagagggaaagaaaaaggacacaaaacacaatattgtaagtggaaaggagaaagtcattacacagcctataagagtaaaaaaataaagagaggatattatgagtaattttatgtcaactgacttgacaaaagtggtgcagggcaggttcttggcttcactaggaaggaatgcagcgtaagctggtggtagaagaaaacagctttactgaggtggcagtgttacacctctgtgactgctcttgtggagcagagctaccccataggcagtgtgccaagagcagtagcatagggcagttttgcagtcatatttatcactgcttttaatgacgtgctaattaaggagtgggttattcagaaataactagaaaatgggcagtaactttcaggttttgccatggcaatggtaaactgatacggcactggtgggcatgtgttatggacaggtgcttccagtgtctcttccttgtgtcacccactcttcaatctggtccagagttgagtcccacctacctcctacctcattgccccttggagattagatactcctccttaatcttaaggggactgcagaagagcagagtcccttttctgtgagtgcttccttctgactttatgggggcaggccttccctagcatttgaagagtaaaaatctttggtatctgaactaaggggcccagtggcaggatgctttcatttgtggggtcagaagacagaatggattgaaagacttatgacggaccgtatcatttttacatgaaatttagaagatataaactttactaggaggttaaacaagaaaattataattggaagagagagaaaaattaatgctcctatgtccacccacagaaccaagttgttaatctatgtgtttgcaaaacaacagccttaagttttctaggttttataaatggaggttgtggtgtccaccttttgtgcctgcaggatctcataagaaacaggtttaatcctggacagctagtggcttcctgaagcctaacagtagttggaataattaagaatatctggtaagggcccctttattctgattattattgattcttgggggatcattttgttgttgttgttttttaagacagagtctcgctctgttgcccaggctggagtgcagtgacacaatctcggctgggctcactgcaacctctgcctcctggtttcaagctattttcatgcctcagccttctgagtggctgggattacaggcatgtacccccatgcctaggtaattttttgtaattttagtagagatatggttttgctatgttggcaaggctggttttgaactcctggcctcaagtgatccacccacctcagtctcccaaagtgctgagattataggcgtgagccactgcacccagccagttccttctttttaagtttttcataagactaagtcttttggttaaacagaggagctattattttgttttgtggaaaagggcactattttattttcataattttaaaagcccttttgaatctggcctacatttcaaacaggggtggagcaaggtgtgtctgactccctgtttcccaccatggcttgagttagattttttttaggtttctttggtagttcctttggccacagagcttggaatgaaaacatttatagccaattaaatattttaggccagacagcatggaggtgggcaggcactcattagcccttaagcaggcagatcatgaggtcaggagatacaggccatcctggctaacatggtgaaaccccatctctactaaaaataaaaaaaattagctgggcatggtggcatgtgtctgtagtcccagctactcgggaggctgaggcaggagaatcccttgaacccaggaggcaggggttgcagtgagccgaggtcgcaccactgcactgcagcttgggtgacagagtgagactccatctcaaagaagaatatatgtatttttaaagctgtataaaaataaaaaagtaaggccccaaataaggttatatatgttaaaaaaccaagtacgtagaataatactatactgggggaaaacattgcttccagagacgcctaagacaaaacactttagcatcaagtccgcaacaacagtcagaaccggaggtgaaaaagccacaggagctgatgaagaagcaaaaggagacagcaatgatctcaggcctttttaaagggagaataagctgaaagcagcaaaacaccacagttgaatctctaagacactaatctcagaagttttaaaagaaactcattattgcatcaaaggcaaaattttctgttttactttttgtttgtttgtttttcgagatagtctcactctgtcactcaggctgcagtgcaatagcacaatcttggctcaccacaagttctgcctcccgggttccagccattctcctgcctcagcctcccaagttgctaggattacaggtacgtaccactgtgcctagctaatttttgtatttttagtagagatggggttttaccatgttggccaggctggtcttgtactcctgacctcaaatggtccacccgcctcagcctcccaaagtgccgggattacaggcatgagccactgcacctggcctgtataattttcaataatgtagcaaattaataacttaagaaaacccagtttcaatatgcagacgattttctagaaagtgactgggccatcattgttctcatctcagatttccacttcctgtatagaaggtgtaagaagaggtagcaagacattatgaaactaaattgtaagcatttgttagtgaacaaaatatgactaaagcgctactttttttaaaaaatttttatttattgttattattttttgatacagggtgtcactcttttaccaggctggagtgtagttgtgccatcttggctcactgcaaccttcgcctcctgggtttaagcaattctcatgcctcagcctcccaagtagctggaattacaggcatgcatcactatgtccagtctatttttagtagagacaacacttcacagtgttggctaggttggtcttgaactcctgacctcaaatgatctacccacctcggcctcccaaagtgttgggattacaggcgtgagccaccatgcccggccttaaagcagtatttttattaaataaagtgtagaagaaaaagtgtaaataaagtgacaaaaagaaaacacaaggccgttatggaaaatgataactttagggaagaaaacaagaaaaggcaaaccaagattcccatagggtgagtctccaatccacaatcctcagacaaatgtcaatgctggaaaccctggagcatccagggagtgaccgaaaataccaaatgctgaaaacccagagtacccgcgtatcagcctatgagtgtcccacaccaaatgccaggaaaccctggagtatccaggggctgaccagtgcagaaaatcctggagcctcagtggggtggccaacagtgagccccaaaggcctggttggggccacagaacaatgtgactctggcttcttagagtcaacagaacaggagaattcttacatccaagtgtcctgccttaaacaattgcacaaacataattagtagggacccaaagaaaaaactgcaaagcaaacacatatatcagggtagaaaataagataaattggctaatggatagataaaatggcattagaggagaaatgactaagagaaggagcaatgaggatgtagtcaggtgtgctatgggggacttcaaatggactatttagccaaaggccttatttcctggatcatctgacatagggcaggtgggtagatgggacacttacaggtgtgcaggagccaaaatggtgccaagcagtgtctaacgtggggcctgtgtgaagatctctccaggccccccagcttgggtgggttgagctcccgtgggtgaactggtgcatgcagcagctggcctgcatgaagcagtggctctgtggccacttacctaactgctcagctccaccgcctgtcaggaaagatgatggctcttaaaacagcctttggctagtgttaacagctctgcaatgttagcaactctgtagctttgctcgctgtagtgctgatccccatcacaccctctctcactgatcactgtcttgccacttctccaatagctgtcttgcccattgctgatcgctatgtccatcttctcacaaaatgccatctcttgctgtctcttgctgtcttgcttctccgctgtttccactgactcactggcacatcaaacgctgcctctcaccatgtcacatttatcctccctcctcattaaacatccatcttcatgtccagcccttgcatcaccaggctgatgtctctgtactgggccaggtactggagagtattgttcctccatcttcaccattaagccatggttctctcaaatcaaaccttctcactgcaccaattttgccaagaaggtttgctgtgcactggttgccaacttacccaaatccggtgacacacagcacccatgcacaaccagttacatgaagtggattactacttacagagagtcagccagagagagcacaaagctgcggggacctgattgacactagactgtgtgtaccccacaaggactgcagctgagggaccctggaatacagcccaccctgggttttatgtcttagaatcacatgacacactgggctagagtgttgaaggaattcctgtttctagtagggacagaaacggaacccaggctgttctggccaatcatgccctatctcagaatgttacatttccagaacattctacagttattccagaaaactacaatcaagaaagggaaggggactgggttgattcaagacaaaatgaaaactattctgcaaataccatagtgaaatcacagctcagtaatctttttgtgactggcttatttcatttagcgtaatgtcctctagtttcatccatgttatagcatgtgtgagaatttccctttttaaagctaaataatatgctattgtatgtatatatcacatttggattaccagttcactcctttgtgaacatttgagttgctctacctgttggctactatgaataattcggttctgaatgtgggtatacaaatatctcctcaagttaatgtcttcaattacttgggtatatgtccaaaagtggaattgctggattatatagtatttccattattaattcttcgaggaattgccatctggtttcccacagcaggtgggccatttacatcaccacgacagtgtccacaggagttccagttccctaagttctcaccatgactggtcattttctgttggaaaaaaaaatcctaataggtgtgaggtgggttttgtttttatttttctaaggattaataatattaagcatcttttcctatgctagttatctaattatctctaaagaatattctccagagaaatgtcgattcatatacttttctcgtttttaatcaggtattttattttaatgttgacatgtaggacttatttttatgtactagatattattaaccccttatcagatatacgatttacaaatattttcttctattccacatgttgcattttcactgtgttggttatgtcttttgatgcccattttacatttttatgtagtccaatttatcttcttttctacttttgcctgtattatggtattaaaggtgttagtattcaaatgtctataaatactgacttactatgctgagaaggtcactctagaccatctctctgatggtggagctaagaattttacactctctcattttgtaccagggcacagtgcagctaggtgagaacacagtggctttctcgagcttatttgtcttgcatttttggcgacaaggattgttgttcacattggcctcctctggcaggtccacctggaaagcattatatttagcaagaaaaaaggaggctgtgaatgatgtcaactgtgtatattccctgttgcaagtgtcaaatccatgaagcataaaaggatttactagaggatattaaattccttgcaaagtgttgaaaaacctgaaggaataggctccaggcaaagcctctagaacaattccaagaatggcactgctggcgcaggctggggaggagctcctgctgcctgagactccacattcaagctgtctcctgcaggaaagagagcagctcttctcactactgccccctgaaggacagcagctctgctatcaactactagagacctgacccctttccctgcagccctgcctgtgttgattatatcttcatgtcagactcatgtagattcatctgttttcaagggtacaggggttatttctgcccaagtccacactgtggctttctatcataaatacacgtttctacacttgaatttccaggaattactagtatcaacagcaaaatgctacaacccaacataaagatttcctttacaaagaacatcatgctccccatgtagcattgtgctccccaaaatgtggggaaactccaatctgttcatcccaacaccatctaggaaaaaatgttcttctctcatgagccattaatctgtctacttattgtttaatttttggcctaaattgtaaaggtggctaaaaatagcactttgaatttttttaaagaaagggtatatagaaaatattaaattatttaaaatacatatatgcatgacacatttagttattgtcaccagcttctttcacatttattttattctgtagtttctggcaatactttctctatggtagagtctggaaatgctactcctcatgtccttggcttcctaagtcccagatgtggtgaagaatgcacatcagctgtgttactacagaatgcttttggattgagatgggggaggggacgtgcttgatctcactcaaatgtgctcaatttcctggtctgggtcacagccaggcagcccagtcctatgggcacaatatcttcactcgccaggtttctatcaaaatgagagtgtccttcttgactgtggaaaacacggggcagggagaggatcaagaaatagcaaaaggagtatttggacttgcctgagctgccactctggtttccccaaatgttttcattccatttcattcatgataataaacacctttctgcctaaccagccataatcacttttcttagatccagctgattcagtgataaaactaaagggaaaaaataaatacagttttcaacgtttaagctgaccaggtggctgtctctggtgtttatacctccatatcccactatgcatttcatcttccctttgcctcactggagatccaagtgcagggaatgcttcacgtgactgtgatccctagaacttcatcttcatgactgttgaaatcttctctgagttttaccagtggaaatggcaataaatagaaagattccagaaggtcccctagggtccatattttctgtacttcttctctaaaataagtaaaatcaattccatttgctcttgctttatattggctacatctatgtgcccaggacacaccctaaagccctgtgttgacaacttatccagtattgtattaagtctaaatggtcacatgcttatcatatcatttcttccaatttcatggaataattgtcatgtcaactctttggattaagaaccatcaaccagataaccacagccctgaataaatagaaacagaatatttcaagctgttcagttggcataacagtgatgagtctatagctcattttcaagatataaatattctatttatgggagtaaaagcacgaatcatggttagtgtttcagagcctccaccacatctgacagcatagcaattcaacagcacaaggtttgtgtgccagctgtgcctgactaataatgtttttttcccctgtctatagggaaatctgcacctgtgcacatgacaagagcatgagctacacttttttcactttttctgaggtaaatacattgcttgatccaaaaccgtattatggaataatttcctgactctgatgaaagcatttggaaaatcctcaaataatatttgtgcagaaatacaaccaaaaagaaaggcaaattcatatataggaaaataaccagtgctctcctcatgttacatgaggtccactagtatcacctgaccccagctgttcatctgatccctgatgtgttgtacaatgttaggggttcaggaggggtcattcttcttggcaaatgaggtgttcagaagagccagtagccctttaagtctcagttagttgaaattcataattgagtccccaaagggacctccataacattggttcatgagactccctggtaaagctgggaaaggtgactgactgaagtccatgtgttgaatcatcctcattattaaaagcccctgctcattaatagcattttgattaatattcactgggaaagcattttttttttattttggctcatctttgaaaagtctagtcatagcttttcaatcactttgtctgcaatcgttttgttgcatttctttgaaggcctgatgatctgtcaaaaccaacagccaatattattacattgccgttatgttgggaaaagctgaatgttgggagaagctgaggcagggcttgcatgtctgacgtaatgtaaaagagtcttggaacacgtccggggtccagggtctaaaaccccttgtggcctttagtacaccaagctctgtgctaaagggtggaaggctaccctgacgcaccataatctaagcccagggcataaaatcccttgtgacttggatagaatccaggactcgtggctctggagtgtgtctacacttgctggctcctttctctttgctctccaaggatcgattgtatcttgagttaaaagaacctgctctccattatctcaagtagtagagcaaatgctaaaccatcacaggtgtaaatcatgtgcttaatgcaatgcatccttttggcctccacattcttaccacgtgtttctttgttggattaccaataaatagcatgggatcccagggctcagggccttcttagcctccatacactacgatggtccctggtgcccacatttctctctcaaactgtctttttctcaatctttgactccaccagactttgtcacccccacgacctggtgttgggtctgatcaccccaaaactgttatcgttgcaatgtgatcatcagatataacccttgcagtttactcattgttatgatttttacatttgcagggcttccttgacaatggcactaatgtgacgccatccagcatccattattgtgagaactctatttggaatatcaccattgtgggcatgaacagaatggagactttcataggatgcaatgtttaatattcaacattagtcaaaatttgttctagtcctacccttggagctccattgagttggaaaaatataaataaatttattttaaatataatataaatgtaaatataaacaaatttaaatataatataaatataatataaatatacataaatttaaacataatataaatataaatataaataaataaataaacaaaaaaattttctgtagcaagagtaagaactacatgtggtccagaataccattattttatggaaggttacaaaaaattttaaatgtatttaattcagataagaattttataaatatgcatatattgcatatatgatagaataaatgtacttaaatatgaatactatatatatttgtagccaacattttatcaaaaacatatatattcacttctatgtatcttatatacatgtatgcatacttttccgtaagataaattttaattttttattgaaatactaattagttttaattttgtctttaattttcttttaataacttcataatttgattactggatattcacatttaaatcaccaatttaagaaaaaatacatgtgtgtacatataggtagaggtgtaaatactgtatcaggaagcttttatgcattactgattggtaactggttaaatacacaactcagtgactgataacagtaaacatttgttttcatgttcacggatgctcatgttcacaatcctctgactgatcaaggaagggctcagctgagtggatcctctgaaggacacagacctcatcttcagcctatagatatcaattgtctgaggactaagctgaacaccagtgactacacatgatacaagattcttgtggcaggtcacaggagtgaacatcccaaaccaaactggacagttgaatttaagtccaataatttctaacatagcttcagatatttaaaatatattcctttatttcagtgagtacaaattttcaagaaaatgtttactccatttaattatagaggtgtttgatcattccatggacaaataattatgttttcatcctttacaatcttgaaaatatttgcaaatgtaaatttgcattaataagaaaataaagctggatgtgttttcaacatgtggctttaaatataattttttaaaatggcctcattgggggaaaatcattttaacttatatgaatatccttttttgcctctcttgtgttctatagagtggcccaataagaggtcctcccatgagatttggaatcaggaaaggatggctcaatattctccattggtacctaggacagacacagggacagagatgaggactggagaaacacctggaaagatgctgtaggaagctgagagcatcagcacccccacccctaagcttccagacaggactgaggaccacatggttagatagcccatacttcaggggaagatgcattcagttttctgagggagcaacagagattcctgcttctaatatcaactttcctgactactatatccttggctttgaaaggttgtagtgggaaagttaatcgtaggaattgggtcattcttgtcatacccaacagagccaagaaaccaggagggaaagacactcagggtgcaaaatattgtctgaagaatgtaattgaaataggccctattatcccatggaactaatgtttatggttttttgaaggaacatagaaattgactcctccagtcttaaaaactcaagatagttatatttttcttatctgaggagttcttttgtcaggaaaccaaccatcaggcctccagatactatcaaaaggagctgaaacttacatatcactgaatcgggacagtgagacatcagactcttcacccattgtgattgcctaactgacctcctgcttcctgttgaccaaatcatcttccttacccctccctaattcctgttttcccacatttcttccctgatatatatacccctcattttagtagttcagggagatacatttgagaatggtgtcccatctcctcggctgcagcacctgattaaagcctgttccttggcaatacttgtcttagtgattgtttttctgtgtggtgagcagcaggatctacactgaatccctggcatttcagtaacaaaattctctgcaagcttcactgcctttggcttattgtaacctgaaatcaaatttatccacaacttctgatataacttgatataactgtaggattcactttgtccaccactgcttcccagtctgagcttgccagctcccaacccttcctagtgcccatgaactttctcaaagagccataggtaacatgttccctttttcgtaaaactctaaccttctctttgttcttccaacatattgaagaccactgagttttcctgtatgccccatttggcaaatatttctttgcacgtaaaacattaaatttagagattcatctctacattttatttagacttcagtagtttagactctaattgtctgtattaagacaattcctgctttgaatatctatagtggcctcttctctgttatataaagtccagctgaagccataaactagactcttcaggtgtcatgatctctgtctttattaaatcaggagaggcattgctagatctgtgcagttggggctgagaaagagaaaagaattagggtgcagaggtgactccatgtccccctctaccaacaccatcagagtgtggctgcatctgaggaccactctcagctgatagaggcatcaggaggagcagctggggcagccctgcctcacacatctgcttccctgggggtttatgttcgggtgtgtaacactgtgggagaataactattatactgttggcagtaataagttgcaaaatcatcaggctgcaggctgctgatggtgagagtgaattctgtcccagatccactgccgctgaaccttgatgggaccccactttctaaactagacgccttatagatcaggagcttaggggctttccctggtttctgctgataccaggccaaccagctactaatactctgactggcccggcaagtgatggtgactctgtctcctacagatgcagacagggtggaaggagactgggtcatctggatgtcacatttggcacctgagattggaaatagaaacacaaatattcatactattgatcatattataggaagacttccctgaataaccaggcagtactgagcacactgggctgagtaaattcctagtgttctccttccttacctgggagccagagcagcaggagccccaggagctgagcggggaccctcatgtccatgctgtgtcctgactgggtctgactcctgcacaaagtgtgaccagcctattaataaggcttcagggcaggaggttgtgctctgggaacatgcaaatgagcaggggatggggcaggctgggcacagctgcagagctggctcatctcagtaactcagcaccagctcagtgtccccaggtgtcccaggtaagaccagggtagcacaaatttgtctgcagagaatgtgtttctactggggactattttattatgagaaacaatttttaggtatttttttgagaattttaaatattcctcaggagccgatagagtaatgtatttcattggtgtatcaggattatttaggagaatattcttgtttgtaggaaacacatagtaaaatgttagatggtaggattctcaagtcttcaaaagactctcataagattccgggtagggaagggggtaattgtgctatacctgcaacatttctgtgagtttaacattgttcctttctaaaaaaaattaaaaataaaatgtatcggcatgatgctatatatttgtaagtattaggtaatggtgttatgcctttgttcttactagtattagatcaagcaatttattacagatatacaaagatgataccgtgttgtctccatgcatgcagcactcacagatccaccactatcaagaactgcaggtctctttaatacccagagactaaatgaggtgcaccttattcttgttttgggtaccttcatagtctaccttcttttctgccattgggtattatttcccaaagttcatctgtcttagtgagggtggccactgcacggagcatgtccctgccatgcaccatcaatgacactttcttcttatactttttatcagtgcatggggacatcatcctgacccagacaccagcctccctgttaacacctttaggaaaaacatactcaatctcttatcaagcaattgtctatgtacatggagaaatcagttggatccagatgaaactggacatggatttgcattcattatatctcatatctctaatgtaccctgaacgtcccagcctgactcagtagcaggggaagtggatgtaaccacatcagcatcagtgggctgcagcctcgggctccacaaaattttactgatgcctgactaggggagcaaaatcacagtgctgcagcccatgcacaaacatttctgctgctttgtaagcagcctgaattttaagggaacttgcttatattggaagaaaggaagaaagttccatttgtcctctaaatgtttgctgaaaatgaaccgacaaaagaataatgaataagagaaaaggcaaacaaaattcacttagagtgcggtgggatatcatagtggggtgattacccagataactcaatgagatccagttgttcatatttcctttctagggaagagggaattgggaagtgtaggcaacctggagagaatagatgaaaaaagaaatgcatcctcaaaagaacaggcaatagcctgcctggataaagcatcaacttgcagtctcttctatttttgattcatgttttgtgttaatcttccctgatataaaatttcccaggaagaatttccttgacaattgtttttcttctggagaatttgcttttaggcagataagggatatttaggaaaagacttcttgtgcatttgctgctttctaaatgcctttggctttacataatcatcataccaatgcagcatagtttgagatgttattttctggattcctttacttgcagccacctgccaagatcctgtttcagagagatgcagctgcagattgagtgagcagttgacccctgaacaacatggaggttggggcactgaccacaggtgcagatgaaaacctgtgtagaagttttgcatttctaacttaagtactaatagcttacttttgactggaagccttagtgataaaataaatagttgattacacttttttacattttatatatattttatactctattcttccaataaagtatggtaaagaaaaaaatgttcttaagaaaaccataaaaatgagaaaatatatttactactgattaagtacttgctttcaggtgacacagaagaaaatataagtgtatctgcaaacttcaaacccaagttattcaagggttaactgtaccatgatgaatgtagcagtccccatctgtagtctagggctttctcctttgctgtacctctgctcacttccaatggccatatatatgtcttatgttctttatgatcttgggcagagaggtctgcctacatgcattgctggccagatgtcctggaatgtgtatctctgaggaaagtgctatggtttgactgtgtcctccaaaatccatctgttgtaaagttcattctcagtgaaatggtttttgccaggtgggccctattgggatgtgtttaggtcatgagggtggagccctctagtggaatacattaatgccagtataaacagggtttatagggctggaatctttctctctcttctgctggtctgtcctgataagacatggccttccttccattgaaggactcaatgccccaggcatcgtcttgaaagcagagaaagctgaccttaacctgcccatgccttgatctcaaactttccgtactccagaagtgtgagaaaatatatttctgttttttatgaattacacagcgacaaggaacctgttatagcagcttgaaagagaacaggagagacagctcacaatcagtgaggataagatgaggtatatacatatcccagctttctcatctctcaggtggaatagcccagaggaatttagtccatgtttccacatgtggttgatcttcagttatcctgagtcaggtgggtggttgatgtgtcttttaccattcatcttctgctcctgcctcactttcttcctttcctcccagtgtaaatttgctgcctaaacaggaatactcattgctggtggacccaaaataagacagaaaaaaaaaatcattgtacttttgtatgagggatatttctcatctgaattcttatcacttctctttctttgacatctaggaatattcagaaaacacttttttttaaccaatctattttagattgaatttattgattttttttcctgtgtgttttgtgaaccaaaaattaagttgtaagccaccaacgagctaaatggactccccttttggcagagagaacttcaaagaaatctgaaaaactaggttaggccatgactggcaggtgggtttggatgtgtctcattatgctctcttccctttggagttcaggcacaactgaccagcattatcattataacagagatctttggactgaggaaacagatgcttgtagcaataagataccatactccaacatgacagataataggccctgaagaaaatctaaaaattttactctaaaaatatttctttttctttttcttttttttgtttttttttgagatggagtcgcgctctgtgcccaggctggagagcagtggcgcaatcttggctcactgcaagctccgcctcctgagttcatgccattctcctgcctcagccttccaagcagctggaactacaggtgcccaccaccatgcccgactaattttttttgtatttttagtagagatggggtttcaccctgttagccaggatggtctcgatctcctgacctcgtgatctacccacctcggcctcccaaagtgctgagattacaggagtgagccaccgcacccaacctatttctctgaaatattctgaagtggccctgcaaagctgcgcgttgtgggagaaatttgcattctgtagagaatctcctatgcttactaatcattttccaaaggtctgactttttttttttaaggtctgacaagcaacgtctactttttctgctacccataggattcatctacacgaaaagaaccttggcttatctaaactcaagcacaccccgttatctaaactcaagcatttctttatggtgaattcaactctttaggcagagcttaactctttcaaccagttgccaatcaggaaaactttgaagccacctgtgacctggaagcccctgcttcaagatatcccacctttccagtacaaactaatgtatatcttatatgtattgatttatgtctttgcctgtaatttctgtgtctccctaaaatgtataaaaccaacgtgtaatccaaccaccttgggcacatgtttacaggaccccctaaggctgtgtcacaggccataatccttatctttggcaaaataaatctataacttgattgagacctgtctcagatactgttttgcttacactgggtcacaaaatttaaaaatcctctaaaactatctacacatccataaatctacattagaggcagtggagtgagcacactccaacagtcaaaactcacaagttagaggaacctgagtctaagattttgtccagctctcttgcttcataaaaataatttgtgatttttttaaattttactctagagaaggacaattttggggaatatgtttatggtcagtggaatgaataatgtccccaccccaaaagatgtccatatcctcgtctctggaacccatgttatacgagttattaagaaactattttaggcatatagagaggaaacagggtccttgggaaggttttgtttcttttaaagcagctccagaaatgtttcttgtttagcaggaaagccctggctcttagagctggtccggcaagcttttttttcttttttagagagggagtctcgctctgtagcccaggctggagtgcagtggcacgatctcggctcactgcaagctccgccctctggtttcctcatgcctcagcctcccaagtagctgggactacaggcgcccgccaccacggccggctaattttttgtatttttcagtagagacggggtttcactgtgttagccaggatggtctcgatctcctcacctcctgatctgcccgcctcggcctcccaaagtgctgggattacaggcggcaagctttgatatacaaatactggccattagaaactgggtccagccaaacatggagattcccacattcttcttctttttttttttttttttttgagatggagtctcgctctgtcgcccaggctggagtgcagtggaacgatctcggctgactgcaacctctgcctcctgggttcaagcgattcttctgcctcagtctcctgagtagctgggattacaggcacatgccaccacgcccagctactttttgtgtttttagtagagacggggtttcaccatattggccaggatggtctccatctcttgacctcatgatccaccttccttggcctcccaaagtgctgagattacaggtgtgagccacggcgtccagctcccacggtcttcttccttgccccgacatttgcctgacaacatggctgcccccacatatccccatgtgtgtagaactttatggcaccctgcatttgcatattaaaacactagggtgggagggccagttttttctcaagctacatgaatgacatgcttggtaaaaccaatcccctaagccctatgcaaatcagacaccacctccttcagcctcctcatataagcagccacttttccaccgcacatggagttttctcttagttctaatctcccctctctctgtctctgtacggtggagctgttttcttcttccttccttcttgcgtattaaacttttcgctccttaaaacaaccccacgcatgtccgtttctttttaaacaaacccgcgtgagactaagaacggtggtggtcctccagtcatcagagccctatcataaggattctaccttacatagcaaaagaagaacttgacaggtgtaagttaacgactttgagaataagcaacctggttatccagatgaaaccaatataatcacaaaggtcattaaaatagaggaggaggcttgcagagaggagctgggacaatatggaaggatgtggtttgaggagggaaggggccatagagccagaaatgtgggagcacctggaagataaaagcagaggattcagttctttcctctggagcctccagaaggaatgcagccctactgacaccttaacattagctcagtgagaatgctgacctccagaactacagggtaatacatttatgttgtgtgaagccaataagactgtggcgatttaaacagcagcattggaaactaatgcaaggggaagaaatgtctttcagctcactgagcgcgtgcttgtcttctgttcttggaaatatttccaccttgttttctggtgtcagttatgacaagagacagagaaaatttttccgagagaagagctaccacgagaattcgtttttagctagaaaatctcctgggtaaaatctcatgattatctgttatacgatctgggtatcacagagtttggggtcagatctcacaacatgtgataggaggaagagggttttgttagtttgttttcatattgcgagggaaaattagattttcaggacacaatctgagaaggacagacagagtcagagatattgtaagagaaagaggagatgtggaaggagtcagggcaatgaaacacgtgtcccagctcccaaatctaaaataaagtcattgattttacaaggtgaagaaaagctcttcaccttccatcttcttaggaaggatcaaattcttcccagagtccctgcccctccttcacccccctgacattgcattgtggagctaatcacatgtgcccttaatccctgctcctgtcccaggctgggagaggctcactgtcctcaccatgcccagcaggctagagctggtgccctaagcaccaaaggagaagaggatgatttctgtgcaggcaataagagctttaccgcattttacatttccctaaaattctaagcaaagttctgtggagagaagagaacatggggcaactttatctggtggggctggaagagaccaggctctgagaatgacaattaattcacatttctacttttccagatgccaaatgctagctttatcaattgtggaaatgtggactttgagtttaagaacaggtttcaggtactgcaataattgaggagacatttggaatagagtccttagtctagggctaaagtcagactggcagtgcctgagagcttccaggcgctggccctgggctgtgagggaagcagcagttctcctgagccacagggctgaggacctgggagcaaccacaggccttggccacagggctgcctggcaggggcttgagggaaggaaactgctcacaaattcacaggagctgcattaagcatatatcccgcagcctggcaagagtgaaagtctcagagacccagaccttagggctggggctgggattctgggctggctgctgtcggctctgccctcccttgtcctgaatgactggcaccctgctggagccaaaaatggagggtcggccaatgtcctcaaagtctttactcagccagaccctgttctgcttggaaagaaaatgaacacatggtatacaaataaacataaaatcatgtgtatctgtaataagaatttctaatataaattttacatattgaatacatatattttagaaataagttgtacttatacatttgcctatactatgtgtctatttatggataaatatgtggtacatgtttatatataaagatatataactttggttgctagtataaggtatagttttaaactttaataaagtaaacacgaacattgaaaatgagcactgggtgcaccacttcatggccctcctcactccagggcctaagggtgataaagctcaggaccctcttccatgtcccccggcatggacagcagtgaactacccattgctgaggatcatgagtgacctgagggggatctgcagaatcacagagcagcagatgcccagaagattgatagtttggaccctgaatggagggacattttgatcacagggctcagcatagacaagtactcttctggtcatttctgtcaaacaaaacagcacatgtagctcagaggctgcatgatcacaggatgaagcacctccatgagtcattgccagcttcccctctgactggggtgatgtgggatctctctgccccactttcatggctcaccagctgctgggactctgttgacagtggtctacatctgtcccacgcacaaacttctcaatagttgtcattttacttactggtctccaataaccacaaattgccagccatgacccttccacaaaaattgatggagtggggttggaactatgggttcagcaatgtgccagggcatgtatataagagaaacaaggtgtggccagcccatgtctgaagtgaggatgaattttcaccatgaattcggagtaggaggtggaagaaaacatcctgacatgctccaggcagtgatgcccacaagatacactagaagcgcccacagaggaggtgggaagggggtgtgagaaaaagagggagtgtgaatttacaggtgtctccagactgttcacctgaaaagagatcagacccttaacaacacctgggaccccaggcagagctgttgctatggaagatttgtgcaggacagggataggaggagggagcacctacctgtgatggcatcttggttgctgttggccagaatgacatcttttcaggcctactgtccctgacccaggcagggatcatgtccaggagggcagcaggagctcagagccaggccctggttctgctagtgccaggctaggatgttcttcatactctggccagctctacaggtgacagtgaccctctcccctgagacacaaggaggaggacaacgatggcatccacataacatgctcactgtcatccaagtgggggaacaaacatgcagatccccaaatattaataccgagtttgtagttcctccaacttggtgcaattctgatcagaaggaaaaacaggctaacaacttcatcagcagggaaagttcatgtttaatacaaactatctgaggctgaagcctgagtttcccttcctcaccaggcagtcaggacagcaggagcaaaaggagaaaagctgggtcccaaagtccacaaggtgcctcctgagactgatcctgcttagagaaggtggtgacagtggatgagtcttctgggactcccacaccaacataccctgagctggatggcttgagccatagacatttattgctaatttattaaacgtttattgtgaatgtattagaaccctggaaagttcaagatcaaagtccagaaggatttgctttctggtgagaaccctgcttcttgttttcagatgtcacccctggatacatcctcacgtgtgttcagcaatgtgccgggcatgtgtaagtaggagaagcaagtacatgctttcttcagtgcatgcttggaggctggtgaggggttaaggaacagatcgatgatgtttatttttactaggacacaaatcctattaaatcagagccccaaggttttcacttcatttcaccctaattaccccttcataacctctatgtctaaatacagtaattttgcaggttggagattcaaaatatgaatttgtgaaacacaattcagttcatagcaggtgtgctttgaggacatgcccaaggcagtaggaagggcaaggcgaggcttccagtctcagagcacagaaggcgttttcccaccactcagcacactggcagctcctcttaggtgatccaggtcacacatgagacgccattcccgccttgggggctgcctgctgataatggaacaatatcacccttaattttcactatttctaagatcagacttctattttatgtttattatggagtttgtccaatggccaggtttgtaacataacctccaatgtttggtttgtgacataacatcttatagaattttagatgctggtttccagtgagacttgatggagttttttcatgggttttcatggagttgatcttattacatccaccattatgctgcattctgtagggaacacaaaatgattcctctcctcaataaaccagtcacctagttgaagataaagggtgttcagaaaagatggtcacaaaacaattaggggctagattctgtgatccatgtgagatgccaatgatgtgattctggaaagcagaaggtgaggttgtgagataccctgcagcacataatgcccaaggctagggtggcgagtagagggcccctggtctggatctgtctacccagcttcattcctcccattcgtgaaacagtggctgcaccagccaggaagcatctgagaccacctgattctctggaataatagctgctgaggtttgtgctgtgagctataacactgtgagtctctaactgtaaccatttagattagcactaatgaaaataatttttaagatggtgaaaatgtctatatctatgctttgcaagtgtagccgttatatgtcatatgtgactcctgaacacttgaaatgtagtgaaaacaactaaggaactatattgttaattttaattaattccaatatacatgtttgtggctgggtactgctaatgttggccatgtgagtcagggaagttttagatggtaataaacagcaatgtcatcaggacaaccaatctgctaaatgttaagcaaagatgatcccaggaccattgcaccaagctggagtggacaaggtggaaagagcacgtaggtggatctttggaacccagattctgcttcctccaggtgaatgatgtaaactctctgtcttgaagacactgacattgaagctagcgactggggagctgagtgtttctcctggaagctgcagtggaaacagaacatagatcttccttagtattactcatgtccctctccataggcttcccagcagagaggtgctgtctgatcaagtgggaggtgaatgctgtgctccctaatcaatagtctttctcagtcccatgggacatatgaaccctgtcacatgcagcccacgcagttgaagccagagccccatgtccagtgtccagtgttgcctctgccttcggtgatcccaccctacaggacccagtgatgaaggcttgagtggcagggaagagctttggggagcctgccaactagcaataagggtgcagacttgggcttccagcttctgagcaagggaacattgtatgtcctaggtgtgatccaggtcaaggtgtttgataaaagatattacaataaattattttcttaagaaaataaaaacacagaaggcatctgattattataggactgtttgggttttataccactaaagtggtaaaaataaatttttcaatgcgcagtggtttatcaggaatctcccagcccctgcccttcccgtgatgattctgtagtctttgcaggttgtatggtcacttggtggcctccttaccgatcagatgcatctacagcacaaccctaagatcttccccgattaacatagatgagcaacttcaacctccagataccacataccattggctgatttttatgcaatttatcaacactgaaagtattctattccatttcattatgtagttattattctgtgcatggctcattcccctactgagtatcagtatttgcgatcaaaaattgttttatttacttacatgcactaaaccttaaatgatagcatttattagttctgaaaactctgacattaagttaaaatcccttaaaagcaactatatgcttctttttttaattagaataaatatggtgcaatcacctcaactaaggatactaaactacttttacagttgaaaatgattaattggacatggggaaacatattgacaaaagtaacaagcattattatgatgttgaataaacacagtttgcatgtaaagtgtacagttatgattaattgtattaaaacacaggaggaagaaaggtggggattgctggattggttggtgattcagtccttagaagcaagggggagctgatgagtgatctcaggcaggcatccaatataaggtccaaatatgattaattacaatgttcttttccttaaggtttgatattttaagctggtcctgctggggaagttttgagcacattcatggaatatgtggaataaagattaaaaacagtatatttcaaaatactcttaaaaagctcagaaacacccaaagaaaactattttataaaatatcatgccttcctcgcccattcttgatatttgtgtttaaccaagcatgactcacaattcaacttttctccacattgttgcctagagtgttgaagaaattcctctaataggacagaaatggagtcaatcttgcaatatctggccaatcgtgttctggccagtcttgctttatctcagaatgttacatttccagaaacttctacagttattcctgaaaactacaagcaagaaagggaaggagactgggatcattcaaggcaaaatggaacctgttctgcaaatactgtagtgaaatcataactcagtaatcgttttgtgactggcttatttcacttagtgtaatgtcctctagtttcatccaagttgtagcatgtgtcagaatttccctttttaaagctaattttgcctttttaaagctacaatatgctactgtatgtatataccacatttggattaccagttccctcctttgtgaacatttgagttgcttctaccttttggctattgtgaataattcggttctgaatgtggatatacaaatatatcctcaagttaatgtcttcagttacttgggtatatgtccaaaagtggaattgctgaattatatagtatttctatttttaattcttcgaggaattgccatctggtttcccacagcaggtgggccatttacatcaccacgacagtgtccacaggagttccagttccctaagttctcaccaagactggtcattttctgttggaaaaaaaatcctaataggtgtgaggtgggttttgtttttatttttctaaggattaataatgttgaccatgttttcctatgctagttttctaattatctctatagaatcttctttagagaaatgtcgattcatgtactttcctcatttttaatcaggtattttattttaaggttcacatataagacttatttttgtatagtagatattattaaccccttatcaaatataagatttacaaatgttttcttctattccacatgttgcattttcactgtgttgattatgtcttttgatgcccattttacatttttatgaagtccaatttatcttcttttctacttttgcctgtattttggtattaaagttgttagtatttaaatgtctataaatactgacttactatgctgagaaggtcacactgcaccatctctctgatggtggagctaagagttttacactctcccattttgtaccgggggacagtgcagctatgtgagaacccagtggctttacccagcttatttgtcttgcatttttggtgacatggattgttattcacattggcttcctctggcaggtccacctggaaagcattatatttagcaagaaaaaaggaggcagtgaatgatgtcactgtggactgtgtatattccctgttgcaaatgtcaaattcgtgaagcataaagggatttactagaggatattaaattccttgcaaattgttgaaaagccttaaggaacaggctccaggcaaagcctctagaacaattccaagaatggcactgctggcacaggctggggaggagctcctcctgcctgagactccacaacattcaagctgtctcctgcagaaaagagagcagctcttctcactactgcccccagaaggacagccgctctgctatcaactacgagagatctgacccctttctctgactgcccatcagatgtgttactacagagtgcttttggattgagatgagggagggaaaatgcctgatctcactcaaatgtgctcattttcctggtctgggtctcagccaggcagcacagtcctgtgggcacagtatcttcacttgccaggttcctataaaatgagagtatctttcttgactgtggaaaatatggggatggtaagggtcaaggaataggaaaaggagtacttggagttgcctgagctgccactctggtttccccaaatgttttcaatccattaaattcatgataataaacacctttctgcctaaccagccataatcgcttttcttagatccaaatgattctgtgataaaactaaagagaaaaaataaatacacttttcaacgtttaagctgaccaggaggctgtctctggtgtttacatgtccatatcccactatgcatttcgtcttccctttgcctcactggagatccaagtgcagggaatgcttcatatgactgtgatccctagaacttcatcctcatgactgttgaaatcttctctgagttttaccagtggaaatggcaataaatagaaagattccagaaggtcccctagggtccatattttctgtacttcctctctaaaatatgtaaaatcaattatatttgctcttgctttatatgggctacatctgtgtccccagcacacaccctaacgccctgcgttgacaacttatccagtattgtattaagtctaaataggcacatgtttatcatattatttcttccaatttaatgagataattgtcatgtcaaatctttggattaagaaccatcagccagaaaaccacagccctgagaaaatagaaatagagtatttcaagctgttcagtttgcacaacaatgatgattctatagctcatttacaagatataaatattctgtttatgggagtaagagcaacattcacggtgagtgttgtagaccctccgccacatctgacagcatagcaattcaatagcacaagggtttgtgtgccagcagtgcttgactaataatgggttttttttctatagggaaagctgcacctgtgcacatgacaggatcatgagctacactttacttcactttttttgaagtcaattaccttcttgatccaaagccacagtatggaagaacttcctgactctgatgaaggcatttggaaaatcctcaaataatattttatgcagtaacataaccaaagacaaaggaaaattcatatataggataataaccactgctctcctcatgttacatgaagtgcacttgaatcacctgacatcagctgttagtatgagccctgatgtgtggtagaatgttaggggctcaggaagggtcaattttcttggcaaattagtgttcaagagagccagtagccctgtacatctcagttagttgaaactcatattattgagtccccacagggacctccgtaacagtggttcatgaggttacctgggaaagtgggcaaaggtgactgactgaagtccatgtgttcaatcatcctcattatgaaaagccccctgctcattaatggcatttggattaatattcactgagaaagcatgtttttcgattatggctcatttttgaaacatctagtcatagctcttccaaaatgactttgtctgcaatcatcctgttgtgtttcttttaaggcctgatgatctgtcaaaaccaacaaccaatattattaaattgctgttctctttgcaatgtggcaatgtgatcatcagatgtaggccttgcagtttacccacggttaggatttttacatttccagggattccttgacaatggcactaatgtgacgccatctagcatccattgttgtgagaactctatttggaatatcatcattgtgggcatgaacataatggagactttcataggatgcaatgattaatattcaacattagtcaaaatctgctgtagtcctacccttggagatctactggtttggaaaaatattttaggtaaggacaacaatttggtaaagttttaaaaataaaggctaaaaagaaattttctttagcaagagtatgaactatctgtggtccagaataccatttttttacagatgcaagaaaaaattatttaaatgtatataatttagataataattttgtaaatttgtatatattgcatatataatagaataaacataattaaatatgaatactatatatacttatagccaacattttatcaaataaatatatattaacttctatgtatcttatatatatgcacatttttccataaataaggtaaattttaattttttaatgaaatactaattagttttaatttcatctttaattttctcttaataacttcataatttgattacttaatgttcacatttataccaccaatttaagaaaaaacacatgtatctatatataggcagaggtgtaaatactgtatcagtaagcttttatgcattaatgattgataatcggttaaatatacaactcagtggctgataactgtaaatatttgttttcatcttcatggatgctcatgttcacaatcatctggctgattaaggaagggctcagctgattgattcctccgcagggcactgagcttgtctttagcctacagataccaattttctgaggacgaggctgaacagcagtgactacacgtgacacaagattcttgtgacaggtcacaggagtgaacaacatcccaaaccgaactgcacagttgaatttaagtccaataatttctaacatagcttcacacattttaaatatattttttgatttcagtgagtacaaattttcaagaaaatgtttactccaattaattatagaggtgtttgatcattccatggacaagtaattatgttttcaacctttacaatcctgaaaatatttgcaaacgtaaatttgcattaataagaaaataaagctggatgtgttttcaacatgtgcttttaaatataatttttgaaatgacctcaaagggggaaaatcattttaacttatgtaactatccctttttacctctcttgtgtcctatagagttgcccaataagaggtcctcccatgagatttggaatcagaaaaggatgactcaatattctccattggtacctaaggcagacacaggaacagaggtgaggactagagaaacacctgaaaagatgctgtaggaagctgagagcatcagcacccccacccctaagcttccagacaggactgaggaccacatggttagaaagcccttacttcagggacagatgcattctgttttctgagggagcaccagagattcctgcttctaatatcagctttcctgactactatatccttggctttgaaaggtcatagtgggaaagttaatcataggaattcggtcattcttgtgatacccgacagagccaagaaaccaggagggaaaggcactcagggtgaaaaatactgtttctagaatgcaattgaaataggccctattatcccatggaactaaagtttatggttttttgaataaacagaaatcgactcctccagtcttaaaactcaagatagcaacatttatcttacctttcttttttttttttttttttttttaaatttcaggaaagcaaccatcaggcctcccagatactatcaatttgctgaaacttatatatcactgaatcgggacagtgagacatcagacccttcacccattatgattgcctaactgacctcctgcttcctgttgacccaattatctttcttaaccctccctaactcctgtttttccacatttcttccttgttatataaacccctaatttcagttggtcagagagatacatttgagaatggcatcccatctcctcagctgcagcacctgattaaagcctggggcttgaaaatacttgtcttagtgattggctttctgtgtgacgagctgcaggatctacaccgaatccctggcatttcagtaacaaaattctctgcaagcttcaccgttttggtttattgtaacctgaaatcaaatttatccaaaacttctgagataacttgatataattctaggattcactttgtccaccactgcttaccagtctgagcttgccagctcccaacccttcctagtgccaatgagctttctcaaaagagccataggtaacattttccctttttcataaaatgctaaatttctctttgttcttccaacatattgaagaccactgagttttcctgtatgccccatttggcaaatatttctttgcaaataaaacattaaatttagagattcatctctacattttatttagacttcagtagtttactctaattctctgtattaagactatatctgcttcaaatatctatagtggcttcttctctgttatacgaattccaactgaagccataaactagactcttcaggtgtcatgatctctgtctttattaaatcaagagaggcattgctagaactgtgcagttggggctgagaaagagaaaagaattagggtgcagaggtgacttcgtgtccccctctaccaacaccatcagagtgtggctgcatctgaggaacaatctcagccaatggaggcatcaggaggagcagctggggcagcccagtctcacacatctgcttccctgggggtttctgttcgggtgtgtaacactgtgggagggtaattgtaatcttgtagacagtaataagttgcaaaatcttcaggctgcaggctgctgatggtgagagtgaaatctgtgccagatccactgccgctgaaccttgatgggaccccactttgtaaactggatgcagcatagatcaggagcttaggggctttccctggtttctgctgataccagcctaaatcatttctaatgccctgacttgcccggcaagtgatggtgactctgtctcctacagatgcagacagggaggatggagactgggtcatctggatggcacatctggcacctgagattggaaacacaaaaacaaatggtccacacaattaatcatgtagtaagagaatttccctgaatagccaggctgtgctgagcaccctgggctgagtaaactgccagtgttctccatccttacctgggagccagagcagcaggagccccaggagctgagcggggaccctcatgtccatgctgtgtcctgagtgggtctgactcctgcacagggtgtgatcagcctgttaataagtcttcaggtcaggagactgtgctctgggaacatgcaaatgagcaggggaaggggcaggctgggcacagctgcagggctggctcatctcagtaactcagcaccggctcagtgtccccaggtgtcccaggtaagaccagggtagcacaaatttgtctgcagagaatgtgtttctactggggactattttgttatgagaaacattttaaagatattttttgacaatattcctcgagagtcaatggggtaatatatttcattggtgtatggggattattttggagaatattcttgtttgtaggaaacacagtacatattagatggtacgattctcaggtcttcaaaagactgttataagattccatttagggaagggggtaattgtgctatacttgaaacatttctgtgagtttaacattgttcctttctaaaaaattaaaaataaaatttattgacatgatgctatatatatttgtaagtattaggtaatggtgttatgccattgttcttaccagtataagatcaaacaatttactacagatacacacccctgatgccgtgcttcttcaatgcatgtggcactaacagccccaccattatcaagagctacaggtctttttaatacccagagactaaatgggctgcacctgtgtagaatttttgcatccctaacttaagtactaatagattgcttttgattggaagccttagcaataaaataaatagttgattaacatgttttttaatgttatatatattatatactctattattccaataaagtatgctaaagaaaaaaatgttattaaggaaaccataaaatagagaaaatatatttactacttattaagcatttgcttacaggtgacacacacagaacaaaatataagtgtatctgcaaatttcaaacccaagttattcaagggttaactgtaccatgatgaacgtagcagtccccatctgtaatctagggctttcccctttgctgtacctctactcatttccaatgaccatatatatgtcttatgttctttatgatcttgggcagagaactctgcctggatgcattgctggccagatggcctggaatgtgtatctcttaggaaagtgctatggtttgactgtgtcctccagaatccatctattgtaaagttaattctcagtgtaatggtttttgccaggtggggcctattgggatgtgtttaggtcatgaggctggagccctctagcggaatacattaatgccactataaacaggaattacagggctgagatctctctcctgctcctctgacatgttaagacatggccttccttcctttgaagaactcaacgctccaggcatcatcttgaaagcggagaaagcagaccatgtggttgatcttcagttatcctgagtcaggtaggttgttgatgtgtcttttaccattcattttctgttccctccctcactttcctcctttcctcccagtataaatttgctacctaacaggaatccttattgctggtggatccaaactgagagagtaaaaaagaaaagtcattaatcttttgtatgaggggtatttctcatctgaaatcttaccatttctctttctttgatatgtacaaatattcaggaagcacctaatttttttttttttaccaatgtatcttagattgaatttacgctgtgattttttttctgtgtgttaaaacaaaaaatcaagttgtaagccaccaacctactcaatgggcttctcttttggcagagagaacgtcaaagaaatctgaaaaactaggttaggccatgactggcaggtgggtttagatgtaactcattatactctcctccctttggagttcagacaaaactgaccagtgttatcattacaacagagatctttagactgacaaatcaaatgctttgtagcaataagataccatactccaacatgacagataataggccctgaagaaaatctaaatattgtaccctaaaaatattttttttgatgtattctgaagtggccctgcaaagctgcctgttatgggggaaatttgcattctgcagagcatctcctcctcttactatgtcttttccaaagagttggacatttctttaaaggtctgataagcaacattcaccatctactttactgttacctgcaaggttcatctaagtgacaagaaccttgacttccacacccccttatctaaactcaaggatttctttatgatgaattcaactctttaggcagagcttaactctttcaaccagttgccaatcaggaaaactttgaagccacctgtgacctggaagcccctgcttcaagatatcccacctttccaggacaaactaatgtatatcttatatgtactgacttaggtctttccctgtaatttttgtgtctccctaaaatgtataaaaccaacgtgtaatccagccaccttgggcacatatttgcagggcctcctaaagctgtgtcacaggccataagccttatctttggcaaaataaacctatacattgattgagacctgtctcagatactgttttgtttacactgggtcacaaaagttaaaaatcctctaaaactctctacacatctataaatctacattagagacagtggagtgagtatacctcaactcaagtcatactttgagtttaagaaccagacagattttcaggtacttcgataaatgaggagacatttggaatagggtccttagcccagagctaaggtcaggctggcagtgcctgagcgcttccaggccctggccctggtctgtggaggaagccactgttctcctgagccacagggctgagaacctgggatgagccacaggccttggccgcagggctgcctggcagggtcttcagggagggaaactgctcacaaattcgcgggagctgcattaagcatatatccccccagcctggcaagagtgaaagtctcaggacacagaccttagggctggggctgggatcctgggctggctgctgtcagctgtgtcctcccttgtcctgaatgactgggaccctgctggagccaaagagggagggtcagcaaatgtcctcaaggtcttcactcagccagactctgttctgcttggaaagaaaaggaacacatgctacaaaaataaacataaaattatgtgtatttgtaatatgaatttctagtataaactttacatattaaatacatacattttagaaataagttatatttatatatttgtatatactatgtatctgtggataaatatgtgatgcatgtttatgtataaagagatgcaagtttcattgctagtataaggtatagttttaaactttaataaattgaacgtgaacattgaaaacaagcactgggtgcaccacctcatggcccctcctcactccagggcctgagggtcataaagctcgggactctcttccatgtgccccctgggccgatagcagtgagctacccattgctgaggatcatgagtgacctgagggggatctgcagaatcacagggcagcagatgcccaggagatggatagtgaatttggaccctgaatggagggacgttttgtccacagggctcagcacagacaagtccttttctggtcatttctgtcaagcaaagcagcacacatggctcagaggctgcatggtcagaggaataagcccctccatggctcattcccagcttcccctctgactggggtgatgtgggatctctctgcccagctttcatgactgaccagctgctgggaccctgttaacaatggcctatgtcagtgccatgcacaagcttcttgatagttaccattttactttctggtctccaataaccacaaattgccaaccatgaccgtttcacaaagattcatggagaggggtcagaattatgggttgagcaacgtgccggggcatgtatgtaagagaaacaaggtgtggccagcccatgtggaagtgaggatgaattttcatcatgaattcagagaaggaggtgggagaaagcatctgacatgcttcaggcagtgatggccacaagatacattagagatgttcatagaagaggtggcaagtgggtttgagatgaaaagggaatgtgaattcagaggtgtcccccagcctgttcccctgagaagatttcagacccttagcaacccctgggcccccaggtagagctgttgctagggaagatttgtacatgataggggacaggaagagggatcacctacctctgaaggcatcttggttggtagtggccagagtgacatctgttcaggcccattattatccctgacccaggcagggatcatgtccaggagggcagtaggagccagcaggagctcagagccatgccccagttctgctggtgccaggctaggatgttcttcatactctggccagccctgcaggtgacagtgaccctctaacctgagagacaaggaagaggatgaagatggcatccacataacatgctcactgtcatccaagtgggggaacaagcatgcagattcccaaatattaataccaagcttttatttcatccaacttgatgaaattctgatcagaaggagaaacagtctaacaaattcatcatcaaggaaagttcatgtttaatacaaactatctgaggctgaaacctgacttccccttcctcaccaggcagtcaggacagcaggagcaaaaggagaaaagctgggtcccaaagtccacaaggtgactcctggggctgatcctgctcagagaacgtggcaacagtggataagtctgccgagaatgccacaccatcatactctgagctggagggcttcaaccacagacatttattgctaatttattagacatttattgcgaatatattagaaccatggaaggttcaagatcaaagtccagaaggatttgctttctggtgagaaccctgtttgtttccagatgtcctctctggatacatcctcatgtgtgttcagcaatgtgccaggcatgtgtaagagaagcaagtgcatgctttactcagtacacgcttggaggctggtgaggggttcagtaacagctcaatgatatttctttttattaggacacaaatcctattaaatcagaaccccgatgttttcacctcatttcaccctaattacctcttcataacctctatgtctaaatgcagtaatattggaggttggagattcaaaatatgaatttgtgaaacaccattcagttcatagcaggtgcactttgaggatatggccaaggcagtaggaagggcaaggcaaggcttccagtctcagagcacagagggcattttcccaccactcagcacactggcagctcctcccaggtgatccaggtcacacatgagaccccattcctgccttgggggctgcctgctgataatgaaacaacatcacccttaatttcactatttctaagatcaggcttctattttgtgtttattatggggtttgtccaatggccaggtttgtgacataccacccaatggcaggtttgtgacataacatcttatagaattttagatgctggtttccagtgagacttgatggagttttttcatgggttttcatggagttgatcttattacatccatcaataggctgcattctgtagggaatacaaaacgattcctctcctcaataaaccagtcacctagttgaagataaagagttgagaaaagatggtcacaaaacaatcaggtgttaaattctgtgatccatgtgagatgccaacaatgtggttctgggaaagagagagtgaggttgtgaggggccctgcagagcacaatgtccagggctagggtcgggagtagagggcccctggtctggatctgtctactcagcttcattcctcccattgttgaaacagtggctgcaccagccagcaagcatctgagaccacctgattctctggactaacagctgctgaggtttgtgctctgagctataacactgtgagggtctaactgtaaccatttagatcagcactaatgaaaataattttttaatatggtgaaaatgtctgcaaatttctaacagaaaaattgatgaaaagatggtttttcttaggcccccacagcagtctctgcctgggacctgactttgtctttgagccagtggaatctatgctgagattgtaagctgggcagggaaatcacagcagggcaggctgtgctctgggtgctgaggaggacaggaggacactccttcagggttagtgatgctgggagttcgaggggagagactgcatggagctgcctgtgaatcgccctagcaatgccctctggacactgctcatctcacaagtgtactcggatgccagtggatggcccaaacatgggctcaggttggacaaggacaaagatttagggatgaatatatggggctcatttgatactctgaagtttcagcacaagcataacgaattatatggggagagaaagaagtcacaaggttgtgatttttcatttggtattaaaatatatcccctctgctcatttttccctgcagaatgtaactactgatacatatttaagcaaagtcactgtttttaattgttttagtaactgacagcctgtgtgcacagttcctaagtaactgggtagccagaccatcattcctatggtaaagccaggaagtgactgtggatgtgaacaaatgtgagtttaatgtacatgtctccaaagccacgggccactgatctagggagaacctgcagtcagtttgctttcccatgcccagatgagaggacaccttgatctgtgttcttctgatgaactctaaaaactctaaaaactgatgaactctaaaaactaatattctgaaggtctagttcatacttcttttctttgctagagggactctctcactcacatgtattgtactctctgcatagaacagtatgtgatacatacaacttgttttctgctaaatacccatcaatcatgtcattcatgagtcttccatagatgttacctgccctatgaatctgggctcttccaaaagaatgggccagaggtggagctgtgctttcacattctcttgtgcttccctcgtggacaacctttgctagttgtcacccttcccacccagcaaaagtaactgtctttctgacatctacacaatcatttaggttttcctgtcttaaacttcatataaatagcattatgtgtatttttatctttttagtcttggtattattccttactacttttgaggccttcatttcttccagtggactcaaggtcctgtctgatgtcatttcctgtgattctgaaggattttctctcaaatgttttataagacatagctgctatgaatgaatgtattttgtttaccaaaatttttttttttgcctttttgttagatttgaaggatattttcactggatagatttcctggctgccttcttttttttccttttcagcatttaaatatgtcattttactgcttctagcctctattggtcccgatgaaaacttagccaatggctacgttgttgtgtctctgtatatagtgtctgcttttattctgatgcaatgaagattttttctttgtctttcaacattttaatatagtgtgttcacttattaatttctattgactatctaaaagggttttattgaattatttcatctaagaatattttttattacttttgaaaagtttttgtcattgtatctccaaatattttttcagccactttctctgtctctccttctttgtgactctcattatacatttgttggtatccttcactctgagctataaatctctgacatttcttcctttttttctaaacattttctttaggctcaaacatttccattcctctattttcaagttaactgattgttctgtcatctcaatttgctattagacctagctaataaatatttaaattgtattatggtacttttcatttctagagttcccatttggtcattttttatactttccatttcttttcttgaggtcctacttgctgaatcttctttttaaaaatattttcgtttttatgtcaatgatcatagttttaaaaataattatttgaacatctgcatattaactgctttgtagtctttgctaaagccaataatgaggacaagttagaatcagctttcattggctattttctgttgtcattattgtagttgctttactttgttccttcaatataaatcatactcctctgtttttttttcaggattttttaaaactgaaagctgcacacttttgataatatattatagtacctctctttagattgtggggtttttattttaattttaatttttttagaaacagggtctcactctgtcacccaggctggagtgtggtggtgtgatcatagctcgctgcagcgtcaacctcttgggctccagtgatcctccagcttcatcctcctgagtagctgggactataggtgcatgccaccactctctgctatttaaaaaaaaaaatttgtagagataagggtgtcactattttggccagcctggtcttgaactcctggcttcatgtaatccttctgcatcaggctctaaagtagtgggattacaggcttgagctaccatgtcaggcctggaactggtttcatttttctgagcattttaaaatttttttcttagttacttgtcagaacttacttctggtacctgacttatgatagttggagttatcattttttgactttcagatggtgtgaaagtgatatgcattcaagtagaaatagtacttctagtatttatacaactattctatcttctctttcaatagagtattcaataaattgcatgagatattcaacactttgttgtaagataaggtttgtgttagataatgttgccctactgtaaactaatgtaagtgtactgagcacatttaggatagaataggctgagctagtggattacatatattaaatgtattttcaatgcatgatattgaaaaatctatatctcatatggtgtttgaccactgatatctctgctttttattcttaatatttagtttgaatttatagaaactgcacatgtatctgcacagcttagtggtcaccaatgatttgagaagaagttttgctcaaatatctggaggttataaatctatcttctgtcaatccatctgtgtgtagtttaaaaagctcctgcaaaatgcagctagttcttacctccctctggttttactttgcaccgggcacttctgggtctcatcactcatatctatagcttctaagtcaccaggaatgtgtgtagagattgtttcagcaatatggctctatcttacccaggaatctgctatttactgttagcaggtgtactacttgccccaaacagggcatcatctttgactaacaaagctgtgggctttttctgttcattccctatggagttctgcatgtttagctggaaacactgaagaattttacttcattccttggctttactcaagttcacccgctttggcagcaagctgctagctttatttgctatcctcatattggtaaaactccagttctgtatttcatgctgactgagctgggggtagaagggtgctgtcacaggcaaaaggctacagactttttctgtccttactcaaagcactagtacttttttttctataaagaatatacatctttaattattttatgcttcaccaattttcagagtgctgaaatagttttgatattttagctttatatgtgtgtttgttatttatttttgcacagaagatttattaaactctttgtgatgccataaacagagatgccttctaaaatgcatttaaatgaacataatagccatgctgaaatggaatgaggttatttactaacataagtaattttggacttgagaacttgaactcttcaccctcagtttaaagagaaaccaaggacttaaaaaatagagaatcctggtccctggatttcacattcatgaagaaatgcacagtcaatttttaagatgccttctttgtattctagaactgagcaaattagtgattacactctacataatgggagctatgattgtctttaatagagataagaattagaaataggaaaaggtagctgggtgcggtggctcatgcctataatcccagcactttgggaggctgagacgggtggatcacgaggtcaggagatcgagaccatcctggctaacatggtgaaaccccgtctctactaaaaaaatacaaaaaaattagtcaggcgtggtggcgggtgcctgtagtcccagccacttgggaggctgaggcaggagaatggcgtgaacctgggaggcagaggttgcagtgagccgagatcatcataccactgcactccagcctgggtgatagagcaagattccatctgaaaaaaaaaaaaaaaagaaagaaagaaataggaaagtgcaaaataggaggaaacttgtggaattgtttaaaaactacctttttcttattttttagttacttgtgtgtgtgttttaagtttatgtggaaatacttttagacctaaaatttgaaaaatatggtaaaaatgattcccatatgcgcctctttcagcttgctctaatgtcagcatcataaataaccacagtataagtatcacaaccatgaaatgaacatagatataatgttatttgttaactcatttaaaataccatatggatttcactgatttttcctgttgatgactttttttatgttacaagataaaattcaggtttctgtattttatttggttatcctgtcctcaatatctttaaatctgtgatagtttttcacttttgtttctctttcatggccttcaaacatttgaagtttactgtccaggtatgttgaagaatgtcctcctagttgggtttgtatatggtgtttactactgattcaattcacaccattaatttttggcaagaataatacagacaggatgtatcctcagtgcttcacatcagatgttacataatgtcaacatgtcttataggtggtaataaacgaatatgatcaatgaaatcccatttggaaggaagttttggacaaaaataatgaaaacaactgcttctatcactctttctactaggtcattgcagacgtcattaggaataatctatttcttccttatcgaatatgtactttattttaacaaactttaatctttttacagtctactgcatcacagagaaaattgaagaaataatttagttaacttttaaatggcaaatgtttccataataaccatttgccactgaaatgttgatagcctgaagaaagaaaaagaatgggatttattcagccatggtagtatcttcacatgaacagcttttaccgagtcaactatttggataaataaatagaattttctactacttagaatgttgcaaaattcaaatggagcagtgtagcatgcactgagctacctctactgggaaagttaagaaccactgaggctatataaggattcatacagtgagtcactatttctggaaacctgggattctggtgcctcagttgaacagagtccaagaatcaaagtccaaattgttcaatgatttttttttagaactgcaaaatgtccaaatagagcagagacgctaaaactgagtggccaccacattagctgtctgtaaaggaagcagctggtaaaatctagtaaacactgatggtcttgttgaggtttttgtttcatgttgaatcactgtgggaggtaagttataatcctgctgacagtaataaactgcaaaatcttcaggctgcaggctgctgatggtgagagtgaagtctgtcccagacccactgccactgaacctggctgggatgctagtggccctggtggatgcaccatagatgaggagcctgggcgcctggccaggtttctgctgataccaggttaagtagctgctgctaacactctgactggccctgcaggagagggtgactctttcccctggagacaaagacagggtgggtggagactgtgtcattacaatttctctggtggtatccaagattggaaataaaacagaaatgcactcatgtaatctagatcaaaccagctgtctttgagtagagccaaaattgttgatctacattgaattttaattatatttcttgctgagcagaggtggcaggagttttcactgatgtgcaaaaccacctcatgttcccctcacctgggagccagagtagcaggaggaagagaagctgagctggggcttccatggttccgtctgggtcctaactgagcagttccttcccagggctctgacccaggcattgatatgggctctggaaggtagggcagctgggagggacatgcaaagcagctgggtgggagctgagcttccagctgcagagaccacctgcttcttcctctctgcactgagcgtcctgtgcctccctggttgtcaggccagaaaagtctgttggctcagtctgagtgtagaactcctcccttgtgctcacataatttcactcctgtgcctttcttctcttcaatcacctaaatacacccgtatgatatttggcacaagtctgttaagaacaatataaaaggctgtgttttcatttctctcttcctgtcctcagtatgcccagtcatctccctaagtgcattattggatctatggaaatgaagagtctgttagaacttaatcttccagatagacattttttttttttttttctgagacggagtctcgctctgtcttccaggctagagggcagtggtgcgatctccactcactgcaagctctgcctcccgggttcatgccattctcctgcctcagcctcccaagtgcctgggattacaagcgcctgccaccacgcccagctaattttttgtatttttagtagagacggggtttcaccatgttagccaggatggtctcgatctcctgacctggtgatccacccgccttggcctcccaaagtgctgggattacaggcatgagccaccgcgcccggcccagatacacctttcatttgcttattagtaatgttttctgagggtcctgaagctttccattaacccagacacataccctctttgagttaaaaacttctgtttacagtcacatgtcctggcagccctgacatagatgctccatggcttgccgattgcttgaaattaatcaagtaacttaacttccctgtgtctcggtttccatatctgtgtaactgtgacaatagtggtacctgccttacagtgctgtagacagtttaaagaaaataagataaaacatttacaatagtattcaggacattatgtatgtggcaattaattttgttttcattgtttaaatattcagcactacagtcatcatcattataaatatacttagcatggaaaatagtcttaaatctaatccaagaatgttttatccacagtcaaattaaattctaaggcattttcttcagtaactgtacacaactcttaaaatcctaatgatttgatcttaatctgtgctaaagtactcagaccttccatcattcccatccatccctgtctaacgcattacttctcatcatccattatttaaatgttaccctataaacggtccccatgtcctgttgctgtccttctttcttatgtaatctttattctaccttgttatcttttatgttattcttgccccaggactgacaataaggaaaagctaccatcatttcttgtagacttgctccagtataattttttcaggcttgttgtcttggaaatgaggattgtgtcttgcaaagaaacatattcattgggtcaatgtgttatgaaataaaagattttatctacttatgatccaataattaatttagactgacttgaacagatttttaatgacaaaaaggagaagacgatataagagaaaaatttaatacaatagaaaacacaagctaatataacgcttgcttcatggatttttacatgtatattagacatatgctgggtatatgtgcgcaacgacaatctaaaaactgaatgataactagcttaaggaatgcctgcattacactgagtcttgcccacttttccagttatgaaaagaaagctacagcactatttgtatgagtatcaaaccttctagatgctgtgatagaggtagagaagatttactgagaccaaagccttggaagtagtagatgcttgttctatgatattatgtggctgtggttgccgttgttaggaaatacagtgggagtgaaagcaaggagaagatttacaagctctgctcttcctcatactcacaaccccctctagagatggacagatgttggtccaggaatctctgacacctcttagaagccttttgctctttccagaatgtttcctgacaagtattgttttgagtcacagattaggtgaaactaggtgtagaagaaaggactagagcaagggaagaagttttccatcccagacagttgttgtaggaacagggaaattgaatttttcatagatttatgtgacacttgtatcatgttggggagagaggcatcaaaccaggctcattactgaaagaattattacgttatttaagagagaaagaactgtgaatttcttgtcaaatagatgtttaaaattcaaaactactattttttttttggagatagaatctcactctgtcacccaggctggagtgcagtggcacaatcttggctcgctgcaacctccctctctccatttaaagcaattctcctgcctcagactcccaagtagctgggattacaggtgtgtgccaacatacccagctaattttcatatttttagtagagacgggattttgccatgttggcccggctggtctcaaactcctgacctcaggtgatctgcctgcctcggcctcccaaagtgctggaattgtaggattgagccactgtgcctggccctactgatgtattaatattattcatcttcttgaatacaccaagtggtaaagtgcaaatccacactttaaacttgagatttctcctcctatgtgaattatactagtgaggaacaaaaaaattctctgttggtggggagatgatgtttgacagcggtcagtttgtgaagcagaggcttatgtcacaggactttttacagtattacatataaacatggtgaatggcctcaaacacagaagaatcagcttttttcatgagccatactaccaccaagaaagaactgaattgaaacctgtgactacttgatgaagggtgtataaagaagagggaaagatttgggaggccaaggcgggtggaccacgaggtcaggagatcaaaaccatcctggctaacatggtgaaaccccatctctattaaaaatacaaaaaaattagctgggcgtggtggagtcccagctactcgggaggctgaggcaggagaatggcatgaactggggagtcggaggttgcagtgagccaagattgcaccactgcactccagcctgggtgacagaacaagaatctgtctcaaaaaaaaagaagagggaaagaaaaatgacacaaaacacaatgtcataaatggaaaggaagaagtcattacacagcctacaggagtaaaaaaataaagagaggatattatgagtaattttatgtcaactaacttgacaaaagtggtgcagggcaggttcttggctacactcaggaaggaatgcagcgtaagctggtggtagaagaaaacagctttactgaggtggcagtgttacagctttgtgtctgttcttgtgaaacagagctaccacataggcattgtgccaagagcagtagcgtaggggcagttttgcagtcatatttatccccacttttaatgacatgctaataaaggagtgggttattcaggaatagctagaaaatgggcagtaactttcaggttttgccatggcaatggtaaactgatatggcactggtgggcatgtgttatggacaggtgcttccagtgtctcttccttgtgtcagccagtcttcaatctggtcctgggttgagtcccacctacctcctatctcattgctccctcagagattagatactcctccttaatcttaaggggactgcagaagagcagagtcccttttctgtaagtgcttcctgctgactttatgggggcaggccttccctagcctttgaggagtaaaaatctttggtacctgaactaaggggcccaatggcacgatgcattcatttgtggggtcagaagacagaatgggttggaagacttatgacagaccgtatcatctttacatgaaatttagaagacataaactttactaggatgttaaacaagaaaattataattggaagagagggaaaaattaatgctcctaggtccacctacggaaccatgttattaatccatgtgtttgcaaaacaacaaccttaagttttctgttttataaatggaggttgtggtgtcccccttttgtggctgtaggaccttgtaagaaacaggtttaatcctgggcagctgtacccaactagtggcttcctgaagcctaacagtaattaagagtaataaagaatatctgataatggctccttattctggttattattgattcttgggggatcattttgttgttgttgttgttgttgttgttgttttttgagatggagtctcgctctgttgcccaggctagagtgcagtggcacaatcttggctgggctcactggaacctctgcctccagttttcaagctattttcatgcctcagcctcctgagtggctgggattacaggcatgtaccaccatgcccagctaattttgtaatattagtaaagatatggttttgctatgttggcaaggctgatttcgaactcctggcctaagtgatccgcccatctcagcctcccaaagtgttgagatgaaaacgtcacaggagctgatgaaaaaggaaaaggagacagcaatgatcccaggcctttttaaagggagaacaagctgaaagcagcaaaatacaacagttaaatctctaagacactaatctcagaagttttaaaagaaactcattatcgtatcacaggcaaaattttttgttttacttgttttttttttttttttttttttttcttttttttgagatagagtctcgctttgtcacccaggctggagtgcaatagcgtgatcttggttcactgcaacctccacctcccaggtttcagccattctcctgcctcagcctcctgagttgctagggttacaggtacatgccactgtgcctggctaatttttgtatttttagtagagacaaggttttactatgtttgccaggctggtcttgaactcctgacctcaaatgatcctcccaccttgggattacaggcatgtaatcccaaagtgctgggattacaggcatgggccaccatgctcagccttaaagctgtatttttattaagtaaagtgtagaagaaaaagtgtaaataaagtgacagaaggaaaacacaaggctgttatggaaaatgataaccttagggcagaaaacaagaaaaggcaaaccaagatttccatagggtgaggctccaatccacaatcctcggatgaatgtcaatgctaaaaaccctggagcctccagggagtggccaacagtactaaatgctgaaaacccagagtacacgagtatcagcctatgaatgtcccacaccaaatgccaggaaaccctggagtatccaggggctgaccagtgcagaaaatcctggagcctcagtggggtggccaacaatgagccccaaaggcctggttggggccatagaacaatgtgactctggcttcttagagtcaacagaacaggagaattcttacatccaagtgtcctgccttaaacaattgcacaaacataattagtagggacccaaagaaaaaactgcaaagcaaacacatatatcaggacagaaaataagataaaatggctgatggataaataaaatgtcattagaggagaaatgactaagagaaagatcaatgaggatgtagtcaggtgtgctatgggggacttcaaatggactatttagccaaaggccttatttcctggaccatctgacatagggcaggtgggtagatgggacacttacaggtgtgcaggagccaaaatggtgccaagcagtctctaacatgaggcctgcgtgaagatctctccaggctccccagcttgggtgggttgaactcccacgggtgaactggtgcatggagcggctggcctgcatgaagcagtggctctgtggccacttacctaactgctcagctccaccgcctgtcaggaaagatgatggctcttaaaacagcctttggccagtgttaacagctctgcaatgttagcaactatgtagctttaatcgctgtagcgccgatctcgccctctctcactgatcgctgacttgccacttctccaatagctgtctcgcccattgctgatcgctatgtccatcttctcacaaaatgccatctcttgctgtctcttgctgtcttgcttctccactgtttctgctgtctcaccaccacatcaaacactgcctctcaccatgtcccatttatcctccctccttattaaacatccatctgcatgtccaggcctggcatccccaggctgatgtctctgtcctgggccaggtactggagagtattgttcctccaacttcaccaataagccatggttctctcaaatcaaattatctcactgcaccaattttgccaaggtttgcagtgtactggtcaccaacttacccaaatctactgggacacaattcccatgcacaacgagtaacatgaagtggattactacctacagagagtcagtcagagagagcacaaagctgccggggcctgattgacactagactgtgcctaccccacaaggactgcagctgagggaccctggaatgcagcctaccctgggttttatgtcttagaatcacatgacacactgggctggagtgttgaaggaattcctgtttctagtagggacagaaacagaacccaggctgttctggccaatcatgccctatctcagaatgttacagttccagaacattctacagttattcctgaaaactacaatcaagaaaaggaaggagactgggttgattcatgactaaatggaaactgttctgcaaataccacagtgaaatcaaaactcagtatttttgagactgggttatttcacttagtgtaatgtcctctagttccatccatgttgtagcatgtgtcagaatttccctttttaaaactaaataatatggaatagtatgtatataccacatttggattaccagttccctcctttgtgaacatttgagttgcttctacatttagctactgtgaataatttgcttctgtatgtggatatacaaatatctcctcaatttaatgtcttccattacttgggtatatgtccaaaagtggaattgctgaattatatagtatttctatttttaatcctttgaggaattgccatcttgtttcccacagcaggtgggccatttacatcaccacgacagtgtccacaggagttccagttccctaaattctcaccaagactggtcatcctctgttggaaaaaaacattctaacaggcatcaggtgggttttgtttttatttttctaaggattaataatattgagcatcgtttcctatgctagttatctaaatatctctaaagtatcttctttagggaaatgtctattcatatacttttctcatttttaaccagttattttatttttactgttcacatgtagaacttatttttgtatagtagatattattaaccccttatcagatatgattttcaaatattttcttctattccacatgttgcattttcactgtgtaggttttatctcttgatgcccattttaaatttttatgtagtccaatttaattttttcttcttttgcctgtattttggtgttaaaggtgttagtatttaaatgtctgtaaatattcacttactacgctgagaatgtcacacttcaccttctctctctgatggtggagctaagagtgttacactctcccattttgtcctaggggacagtgaagctaggtgagaacccagtggcttttctgagcttatttgtcttgcatttttggtgacatggattgttgttcacatcagcttcctctggcaagtccacctggaaagcattatatttagcaagaaaaaaggaggctctgaatgatgtcactgtaagctgtttatattccctgttacaaatgtcaaatccgtgaagcataaagggatttactagaggatattaaattccttagaaattgttgaaaagccttaagcaacaggctccaggcaaagcctctggaacaattccaagaatggcactgctggcgcaggttggggaggagctcctgctgcctgagactccacattcaagctgtctcctgcaggaaagagagcagctcttctcactactgccccccgaaggacagctgctccgctatcaactactagagacctgacccctttctctgcagacctgcctgtgttgattacatcttcatttcagtctcatgtagattcatctgttttcatggattcaggggctatttctgcccaagtccaccctgtggctttctatcataaatacacatctttctacactcgaatttctagtcattactagtatcaacagcaacatgctagaacctcacataaagatttcctttacaaagaacatcatgctccccacgtagcattgtgctccccagaatgtggggaaagtccaatctgttcagcccaacaccatgtaggaaaaaaggctcttctctcatgagccgttaatctgtctacttattattaatttgtgggctaaactataaagactggtaaaaatagcacttcgaattcttttaacaaaagggtgtaaagaaaagattaaattatttaacatgcatatatgcatgactcatttcgttattgtcaccagcttctttcatatttattttattctctagtttctggcaatactttctctatggtagagtctggaaaggctactcctcatgtccttggcttcctaagtcccagatgtggtgaagaatgcccatcagctgtgttactacggagtgcttttggattgagatgagggaggggaaatggctgaactcactcaaatgtgatcattttcttggtctaggtcacagccaggcaacacagtcctctgggcacaatatcatcacttgccatgtttctatcaaaatgaaagtatctttcttgactgtggaaaacataggggtgggggcggggagggtcaagtaatagcaaaaggagtacttggagttgcctgagctgccactctggtttccccaaatgttttcaatccatttcattcatgataataaacacctttctgcctaaccagtcataatgacttttctcagatccaactgattcagtgataaacctatagagaaaaaataactacacttctccatgtttaagctgaccaggatgctgtccctggtgtttacacctccatatcccactatgcgtttcatcttctctttgcctcactggtgatccaagtacagggaatgcttcacatgactgtgatccctagaacttcgtcctgatgacggttgaaatcttctctgagttttaccagtggaaatggcaataaatagaaacattccagaaggtcccctaggttccatattttctgtacttcctctctaaaatatgtaaaatcaattatgtttgctcttgcttttatggactctatctatggccccagcacacacgctaatgccctgtcttgacaatttatccagtattttaataaatgtaaatggtcacatgcttatcatatcatttcttccaatttcatggaataatttcacatcaactctttggattaagagccgtcaaccaaaaaaccacagccctgaataaatagaaatagagtatttcaagctgttcatttggcataacaatgatgagtctacagctcattttcaagatataaatattctgtttatgggagtgacagcaccattcatacagttactgtttcagagcctccaccatatctgacaggacagcaattcaatagcacaagggtttgtgtgccagctttgcttgactaataatgggtttttctctgtctatagggaaagcacatgacaagagcatgagctacacttcacttcactttttttgaggttaataagttgcttgatccaaagctatattacagaagaacttcctgactctgatgaaagctcttggaaaatcctcaaataatattttatgcagaaatataaccaaaaaggaaggcaaattcatatataggaaaataaccagtgccctcctcacgttacatgaggtctactagtatcacccgacaccagctgttagtctgagccctgatgtgtggcgcaatgttaggggttcaagagacgtcattcttcttgacaaattaggtgttcagaagagccagtagccctgtatgtctcagttagttgaaactcatattattgagtccccacagggacctccataaccttggttcaggagacaccttggaaacctgggaaaggtgattgactgaagtccatctgttgaatcatcctcattattaaaagcctcctactcattaacggcatttcgattaatattcgcttggaaagcatgtttttattttggctcatttttgaaacgtctagtcatagttcttcctgaaccactttgtctgcaatcatcctgttgcatttcttttaagggctgatgatctgtcaaaagcaacagccaatattattacattgctgttctctttgcaatgttatcatcagatgtaacccttgcagattaaccactgttacgatttttacatttccagggatttcttgacaatggcaatgatgtgacgccatccagcatctatttgtgagaactctatttgacaaatcatcactgtgggtgtgaacataatggagactttcataggatgcaatggttaatattcaacattagtcaaaatttactctagtcctacccttggagctctactgggttggaaaaatattttagataaggacaatcatttcatagagttttaaaaataaaggctaaaataaattttctgtagcaagagtatgaactatatgtagccagcatacccttttttagtggcatataacaaaaattatttaaatgtatttaatttaaataattgtataaatatgcatatataataaacatacttaaatataaatactatacatgtatatttgtagccaacattttatcagataaatatatgtaacttttatgtatcttatatacatatatgcacattttccataaataaggtaaattttaattttttattgaatactagttttaattttgtctttaattttctcttaataacttcataatttaatactaaatgttcacatttataccaccaacttaagaaaaaatcgtgtgtgtaggtagaggtgtaaatactgtatcaggaagcttttatgcattactgattggtaactggttaaatccacaactcagtggctgataacagtaaacatttgttttcgtgttcatggatgctcatgttcacaatcatctggctgatcaagaaagggctcagctgagtggtttctctgcagggcactgagctcatcttcagcctacagatatgaattgtctgaggacgaggctgaacagcagtgactacacatgacacaatattcttatggcaggtcacaggagtgaacaacatcccaaaacaaactgcacagttgaatttaagtccaataacttctaacatagcttcacatattttaaatatattcctttatttcaatgagtacaaattttgaagaaaatgtttactccatttaattatagaggtatttgatcattccatggacaaataattatgctttcaacttttacaattctgaaaatacttgcaaatgtaaatttgcattaataagaaaataaagctggatgtgttttcaacatgtagctttaagtatatatatattttaatggcctcagtgggggaaaatcattttaacttatgtaaatatccctttttgcctctcttgtgtcctataaagttgcccaacaagaggtcctcccataagatttggaaatcagaaaaggatgactcaatattctccattggtacctaaggcagacacaggaacagaggtgagggctggagaaacacctggaaggatgctgcaggaagctgagaacatcaacactcccacccctaagcttccagacaggactgaggaccacatggttagatagcccatacttcaagggcagatgcattctgttttctgagtgagcgccattcaatcctgcttctaatatcaactttcctgactactatatccttggctttgaaaggttgtagtctgaacgttaatcataggcatcggttcattcttgttatacccaaaagagccaagacacccagtggggaaaggcactcagggtgtaaaatattgtttctagaatgcaattgaaataggccctgttatcccatggaactaaggtttatggttttttgaataaacagaaattgactcccccagtcttaaaactcaagatagttacatttgtcttatctgagttcttttttcagtaaaccaaccatcaggcctcgtagatactatcaaggagctgaaacatacatatcactgaatccggacactgagacatcagaaccttcacccattatgattgcataactgacctcttgcttcctgttgaccaaattatcttccttacccctcccaaattcctgttttcccacattttgtccctgttatataaagtcttaattttagttggtcagggagatacattcgcaaatggtgtcccatctcctcggctgcagtacctgattaaagcctgtttcttggcaatacttgttttagagattggctttctgcgtggtgagcagcagggtgtacaatgaatccttggcattttagtaagaaaattctctgcaaccttcactgctttggcttcttgtaacctgaattcacatttaactgcaacttctgagacaacttgatataattgatataattagtgaatcctaattcactttgtccaccactgcttaccagtctgagcttgccagctcccaacccttactagtgccagtgaactttctgaaaatgcaaaaggtaatattttccctttttcataaaacactaaccttctcttcgtacttccaatatattgaagaccactgagttttcctgtgtgtccaatttggcaaacatttctttgcaaataaaacatgaaatttagagattccgctctacattttatttagacttcagtagtttagactctaattttctgtattaagacaattcctgcttagaatatctatagtggtttcttctctgttatttgaattccaaccaaagccctaaactagactccttaggtgtcaagatctctgcctttattaaatcaggagaggcattgttatgtctgtgcagctggggcttacaaagaaaaaggaattgggttgcagaggtgatttcaggtccccctctaccaacaccatcagagtgtggttgcatctgaggaacactctcaggcgatggaggcatcaggaggagcagctggggcagcccagcctcacacatttgcttccctgggggtttttgtttgggtgtgtaacactgtgggagggtaactataatactgttgacagtaataagttgcaaaatcttcagactgcaggcagctgatggtgagagtgaaatctgtcccagatccactgccgctgaaccttgatgggaccccactttgcaaagtggatgcagcatagatcaggagcttaggggctttccctggtttttgctgataccaggctaaataactgctaataccctgactcgcccgacaagtgatggtgactctgtctcctgtagatgcagagaatgaggatggagactgggtcatccggatggcacatctggcacctgagattggaaacataaaaacaaatgtccatacaattaatcatgttgtaagagaacttccctgaagggccaggctgtaccaagcacactgggctgagtaaattcctagtgttctccttccttacctgggagccagagcagcaggagccccaggagctgagcggggaccctcatgtctatgctgtgtcctgacagggtctgactcctgcatgaagtgtgtccagcctattaataagtcttcagggcaggaggttgagcaggggatggggctgactgggcacagctgcagggctggctcatctcagtaactcagcaccagctcagtatccccaggtgtcccaggaaagaccagggtagcacaaatttgtctgtggtgaatgtgtttctactggagagtagtttgttatgagaaacattttttatgtatttttttgaaaatttgaaatattcctcaggagtcgacggagtaatgtatttcattggcacatggggattatttggaatatcttgtttgtaggaaatacatagtaaaatgttaaacagtatgattctcaggacttcaaaagactctcatatgattcgggttagggaaggaggtactttgtcctatacttcaacatttctgtgagttttaacattgttcctttctaaaaatattaaaaataaaatttattgacatgatgctatacatatttgtaagtattaggtaatggtgttatgccattgttcttaccactataagatcaagcaatttactacagatacagagagatgataccgagtttcctcaatgcatgcagcactcacacatccaccattatcaagagctacaggtctctttaatacccagagactaaattcacttcaccttattcttgttttgggcaccttcattgtctaccttcttttctgtcattgagtattactttccaaagttcttctctcttattgagggtgaccactgcatggagcatgtccctgtcatgcaccaacaatgccactttcttcttttacgttttatcagggacatcatcctgacccagacaccatcctccctgttaacatctttaggaaagagacaatcccttatcaagcaattgccaacttacatggagaaatcagctggatccagatgaaactggacatggatttgcagtcattatatctcacatctctactgtgccaaaaatgtcccagcctggcttagtagcaggggacgtggatccaactacatcagcatcagtgggctgcagcctaggactccacaaaattttactgatgcctgactaggggagacaaatcacagtgctgtagcccatgcacaaaccttcctgctgctttgtaagccacctgaattttaagggaacttgcttatattgggagaagggaagaaagctccatttgtcctctaaatgtttgctgaaaatgaactgacaaaagaaagactaataagagaaaaggcaagcaaaattcacttaaagtgcagtgggatatcatagcggtgtgattactcagataactcaatgagatccagttgttcatacttcctttctagcgaagaggtaattgggaagtgtaggcaacctggagagaatagatgaggatagaagtgcatcctcaaaagaacaggtaatagcctgtctggataaagcatcaacttctaatctcttctatttttgattcctattttgtgttaatcttccctgatataaaatttcccaggaagaattttcttgacaatcagtttccttctggagaagctgcttttaagcagataaaggagtgagataaaggagtggagtgagcataccccaacagctaaaactcacaagttagaggatttataagtcagactctaagtctcagattttgtaccgccctcttgcttcataaaaatgctttgttattttttaaattttactttaaagaaggacaattttggagaatatattaatttttggtggaatgaataatgtccccaccccaaaagatatccaggtccttgtctctggaacccaagttttataggagttattaagaaattattttaggcagatagagaggaaaaggcatccttggtaagattttgtttcttttaaagcaactccagacatgtttcttgtctaataggaaagctccggctcttagagccaggctggcaagatttgatatgcaaatgaaggccattagaaactgggtccaccctaacatggctattcctaccttcttcttccttgcccctacatgtgcctggcaacatggctgcccccacatatccccatgtgtgtagaacattatgatgccctacatgtgcatattgaaaggctagggtgggagggccagtttttgctcaggctatgtgaataacatgcctggtcaaaccaatcccttgagccctttgcaaatcagacaccacctccttcattctcctcatataagcagccacttttccaccacagatggagttttctctttgttggaatcccctgtccctctgtctttgtacagggtagctgtttagctgttttattcttccttccttcttacatattaaacttttctctccttaaaaccactccacatctttctgtggcattttatccaaagcagtgtgaaacagcaagaaccctggtgttcctccagtcattggagccatatcataaggattctaccttatgatagatagcaaaaaatgaccttgatagatgtaagttaaggactttgagaataagcttcctggttatccagatgaaatcaatacaatcacaaaggtccttaaaatagaggaggaggattgcagtcagagaggagctgggacaatggggacggatgttgtttgaggaaggaaggggccatggaaccagaaatatgggagcacattgaagataagaagcagagaatccagttctctcctctggagcctccagaaggattacagccccactgacaccttagcattagctcagtgagacttctgacctccagaactacagggtaatacatttatgttgtgtgaagccaataagactgtggcaatttaaacagcagcgttggaaactaatgcaaggggaagagatgtctttcagctcactgagagcatgcttgtcctctgttcttggaaatatttccaccttgttatctggtgtcagacaagagacagagaaaattttttctgagagaagagctcgtacaaaaattctttttagctagaaattctctttggaaaatcccatgattatctcttatacgatctgggtatcacagagtttaggggtcagaactcacagcacatgataggaggaagagggttttgttagtttgttttcatattaggagggaaaattagattttcaggacacaatctgagagggacagactgggacagggatattgtaagagaaagaggagatgtggaaggtgtcagagcaatgaaacatgtgtccctgcttccaaatctaaaataaagtcattgattttagaaggtgaagcaaagctcttcaccttccatcttcttatgaaggatcaaattctacccagagttcctgtccctcctttactcccctgacattgtattgtggagctaatcacatgtgccttaatccctgctcctgtcccgggctgggagaggctcactgtcctcaccatgcccagcaggctagagctcatgccctagacaccaaaggagaagaggatggtttctgtacaggaggtaagagctttaccacatgttacatttcactataattctaagtaaagttgtgtggagagaagagaacatatgggcaactctgtctggtagagttggaagagggcagtttctgagagtgacaatgaattcacatttctaaattttcagatggcaaatgctagctttagcaattgtggaaatgtggactttgagtttaagaacaagacagactttcagatactgcaataaatgaggagacatttggaatagggtccttagcccagggctaaggtcaggctggcagtgcctgagagatgccaggcactggccctgggctgtggaggaagcagctgctctcctgagccacagggctgagaatctgggaggaaccacaggccctggccacagggctgcctggcagggcttcagggaaggaaactgctcacaaattcaggggagctgcattaagcatatatcccccagcctggcaagagtaaaagtctcagagacccagaccttagggctggtgctgggatcctgggctggctgctgtcagctctgccctccctggtgctgaatgactgggaccctgctggagccaaaaacggacagtcagcaaatgtccttaaagtctttactcagccagactctattctgcttggtcagaaaagaaacacacgctacacaaataagcataaaattatatgtatctgtaatatgaatttctattgtgaactttacatattgaatacatatttaagaaataagttgtatttatatatttgtatatactatgtatttatgaataaatatgtgatgcatgtttatatataaagagatataactttggttgctagtataaggtatagttttaaacttaaataaatttaacatgaacattgaaaatgagcactgggtgcaccacctcatggccctcctcactccaggacctgagggtcataaagctcagtaccctcttccatgttccccctgggctgagagaagtgaactgcccgttgctgaggatcatgagtgacctgaggggggtctacggaatcacagaacagcagatgcccaggaaatggatagtgggtctgggccctgaatggagggacgttttgtttccagagctcagcatagacaagtcctcctctggtcatttctgtcaaacaaagcagcatatatggctcagaggctgcattgtcacaggatgaagcccctccatggctcattccagcttcccctctgactggggtgatgtgggatctctgcccagctttcatggctcaccagctgctgggactctgttgacaatggcctatgtctgccccatgcacaagcttctcaatagttgccattttactttctggtctccaataaccacaacttgccaaccatgacccttccacaaagattcatagagtggggtcagaactatgggttcagcaacgtgccggggcatgcaggtaagagacacaaggcgtggccagcccgtgtctgaagtgaggatgaatttgcatcatgaattcagagtaggagatgggagaaaacatcctgacatgctccaggcagtgatgcccacaagatacactagaggtgcccatagaggaggtgggaaggggatttcaggcagaggggatgcgaatttagagatgtcccccagcctgttcccctgagaagatttcagacacttagtagcccctgggcactttgagagaccgaggagaaaggaccatgtaaggccaagaatttgatgccagcctgggcaacacagggagaccccatgtctacaaaacacacacacacacacacacacacacacacaatttgttaaaatgtgtgaaaaatagcatcacaaagtgattatgtatgaacatttgctcagaaaattagaaaacaaagcaatgtcttctgagctaacaatactataataaagatgtcaattttttagctatagtaatacagagaacatgatattgtctatcttaaccatttctaagagtgtagtgcaatgccattaaatatattcacattgctctgctattattactgatactaaatccagaaccattttcatctgaataaaattaatatctatatcctttaaacaatactcccccccatttcctctatccctaccgccagcaacctccattccagttctgtctctatgtcattgacatatttgaagcaggttcactctgcactggttaccaacatacttgagtgtggggaacacaacacccccacacagcaagttacatgaaatgggtttattatttacagataagcagcaagggaacaccacaaaagtcttggacttattatgggtcagtccctcaaggcacaggaaagccatgtggagctgatggagttgactatgtgtaccccacatgcaccacagctcaggaatccaggaaagcagccactcagggttttatatcctgagctaagaagacacacagggctaaagtgctaacggacatcctattctatgggaaactggtatagagcacaggtaggttgttctgctcagttcctctccatctcaggatgttacgattccagcaaattctacaattattcttgagaactcataaaataagcaagaaagtggagagaactaagtcagtccagggtcattggagaactgttttgcaattaccccaccacctagacatcccccttagcaaagctagcatatttcatatgcccaccaacttcccttgaactggaggcagaagtttatcttttcagattgatgaagcaccttgactaacacaacttcaatgcagattatgaagccatagtgagagtacatttcactgggccacgaaaagctagtaccactggtgtagggtccagccctgtggggcttagtgggggttctccccatgtgcagagatgagagattgtaataaagaaagacacaagacaaagagataaagagaaagcagcttggcctgggggaccactaccatcaagacgtggagactggtagtggctctggacggctgggcacactaatatttattacatacaagacaaggggggcagggtaaggagggtggatcttccaagtgattgataaggtgaagcaagtcacgtgatcataggacagggggcccttcccttttaggtagccgaagcagagagagagaagacagcatacgtcagcattttcttctacgcacttataagaaagatcaaagactttaagactttcagtatttcttctaccgctacctactacgaacgtcaaagaggaacccggagtatgggaggaacatgaatgtggacaaagagtgtgaccattgaggcacagcaccacagggaatggtttaggcttccggatgactgtgggcaggcctggataatatccagccttccacaagaagctgggggagcagagtgttccctgactcctccaaggaaaggagactccctttcgcggtctgctaagtaaagggtgtcttcctagacactggcattactgcttgaccaaggagccctcaagtggcctttatgcaggtgtgacagagggctcacctcttgccttctaggtcacttctagcaatgtcccttcagtacctgacactatactcttaggttattcctaggttatattagtaatgcgacaaagagtaatattaaaagctaatgattaataatgtttataatagtgattgataattgtccatgatcatctctatatctaatttgtgttatgactattcttattctaactattttctttattctactgaaacagttttgcctgcagtcttttcctcggcacctacgtaatctttcacacacacactggcaggagggtaagactccccaaagcagtgactaagatgttaagaagtgaaagggggatctttcagatgccctattctctgcagccagtgggcctgctttaggatcacctctacttgtatttctagaatacccgaggtgtttatccaggcacagcaggtagtattgggtgttggtaattgcgtggaaagtctccgttgggttcctcaagaatgtgcccattgtcatgcggattgggcggttgtttcttggtcagagtgaagtctcatggggtatccaaaaacatgacataaattcctttcaaaggtcaccatggtagccccagcatctaactgagtgacatacatttagctgtccaggaagcaagctatggccatagtccttttccctacacaggggatcctttaatagttctgccactcagttgctattttcctgaccagatggctgggttgttggcaatggcccatgatttagtggaaatggagcaaaatatagtgttgggggcagcctgcatggctactatcattgcatgaagtttggcccactgggcagaatgtccatgttcagtgtcagtcaaaagatgccatcccctggctggatggtggcctcacccagtggacccactggcatgtattttgtacaatcatcagggccccatgccatactgacataggcatgtctctgaatcgttggctcattgtggccaaaggaaaaacaaaattgtcccctatgggtcatttgttcccttctaggaagcttgctatttgtttatgggcattcatccatttgcacatggatcctgtgggaactgggttagggcgaattctgactgtaccagttccatttaataatttggatctgttgggcctgtccagttttattgattgtgtttgtaggcaccaaagtgagaatgggtagttaaggtagcagcgtcatccctgatgctctagctatgagataatcagcccctatcagtttcctacagcaagaagttgccattcaaaagaggcacaactggtggcttctgttgccacaggctccagtcagcatatatagaaatagtggacacctggatttccattgagcaagcagcctctgaaggtcttaaagaagtgcctcagtcatgccttgttgaacagattccaagggtgattttgactaacatgaccaaaagaacacccaggtaaggtttctactgtccccagtaccccaaaatacctactagcttctgggtctccatcttattagtggacgccaccaggaccagcaatgattaaatatacctgggatacctcctaggtttctttttcaggtggccttggcattcagccttcaacaatccatcattggtctgccaaactgggttgttccattgtgacaccaggctttgtgacattttaatctttttgtagcaactattaaatttactaggtagtgttccgatcttcactgaatatgcagtcctgctttgtgaacaacactctgggacacgggaagcttaggtggcaggcaggagtggatatgccccactgtcgtgtcttgaatacttagctatgagtgcggatagcccctcaggcagcagtgatgttttgtggcacagcagcaaaatgtcagtacctctattgcactctgcagtgagaaccatggtcaccagcacccaacatagcccaaagggtgtggtccacatgcagatcagcacacaagcacatactcaccatggggtcctcatttgtcttgacaccttctgatgtcttcagtttatttttttccagggaggacctggtaatattgtcaggtggattgcagcatacaaaaatcccagaatagtctgaattcttttttttttttttcaccttttatcttgagaggaatatagggctggtagcctctggtggagaccttggccctgttcctacctgtgccattcagacagacatttgggtctgcaatgtggcttaaccaaacaaacacaccgaccaggctgcataagacttccctcgtgtttttccatgtctcttttatagagagtgagcctccttttctgtgatggccattgttgttcattttggttccttatcagatgcttcagggaccattgagattatctttcttgtgtcatcttgggtgactcagggtccatctgattacccatgtcttgagctctcttgcctcaggaatgagcaatcatgcaactgtctaacaactagaaaattgtgtaccccattcctatttccacattcttttttctatgtctcaattcagtcagccagctgatccatattaatgggaggaggacaaatgtcctgtttatcctccctcctcattaaacatccatctgcatgtccagcccttgcatctccaggctgatatctctgtcctgggccaggtactggagagtattgttcctccaacttcaccataagccatagttctctcaaatcaaaccttctcactgcaccaattttgccaagaaggtttgctgtgcactggttgccaacttacccaaatctagtgagacagaacacccatgcacaaccagttacatgaagtggattactacttacagagagtcagcatgagagagcacaaagctgtcagggcctgattgactctagaccatacatacccaacaaggactgcagctgagggaccctggaatgcagtccaccctgggttttatgtcttagaatcacatgacacactgggctagagtgttgagggaattcctctttgtagtagggacagaaacagagcccaggatattttggccaatcttgttctagctcagaatgctacatttccagaacattctacagttattcctgaaaactactagcaagaaagggaaggagactgggttgattcatgactaaatggaaacttttctgcaaataccaaagtgaaatcataactcggtatttttgagactgggttatttcacttagtgtagtgtcctctagttttatccatgttgtagcgtgtgtcagaatttccctcagtaatgtgcttttgtatgtatataccacatatggattaccaattccttcctttgtgaacatttgagttgcttctaccttttggctactatgaacaattcggttctgaatgtgggtatacaaatacgtcctcaagttaatatcttcaattacttgggtatgtgtccaaaagtgtaattgctgagttatatagtatttctatttttatttctttgaggaattgccatcttgtttcccacagcaggtgggccatttacatcaccaagacagtgtccacaggagttccagttccctaaattctcaccaagactggtcattttctgttggaaaaaaatcctaatatgtgcaaagtggggtttgtttttatttttctaaggattaataacattgagcatcttttcttattctagttatctaattatctctaaagaatcttctttagggaaatgtctattcatgtacttttctcacttttaatcagttattttatttttactgttgacatgtagaaattatttttgtatagtagatattattaaccccttatcagatatgatttaaaaatatttttttctgttccacatgttgcattttcactgtgttgattatgtcttttgatgcccattttaaatttttatgaagtccaatttatcttcttttctacctttgcctgtattttggtgttaaaggtgttagtatttaaatgtctatacatactgacttactatactgagaaggtcacactccaccatctctctgatggtggagctaagagttttacactctcccattttgtaccaggggacagtgcagctatgtgagaacccagtgactttcccgagcttatttgtcttgcatttttggtgacatggattgttgttcacattggcttcctctggcaggtccacctgaaaagcattatatttagcaagaaaaacaggaggcagtgaatgatgtcactgtggattgtgtatattccctgttgcaaatgtcaaattcgtgaagcataaagggatttactagggatattaaattccttgcaaattgttgaaaagtcttaaggaacatgctcctggcaaagcctctagaacaattccaagaatggcactgctggtgcaggctggggaggagctcctgctgccttagactccacattcaagctgtctcctgcagaaaagagagcagctcttctcactactgcccccagaaggacagccgctctgctatcaactactagaaaactgacccctttctctgcatacctgcctgtgttgattacatcttcatgtcagtctcacatagattcatctgttttcaaggctgcagggtttatttctgcccaagtccatcctgtggctttctatcataagtacacatctttctacacttgaatttccaggcattactagtatcaaccacaacaggctacaatctaacataaatattttctttacaaagaacatcatgctaccaatgtagcactgtgctccccaaaatgtgaggaatctccaatctgttcagcccaacaccatccaggaaaaaatgatcttctctcatgagccattaatctgtgtacatattatttaatatgtggtctatattataaaggtggctaaaaatagcactttgatttttttaaagaaagggtgtattgaaaagactaaattatttaacatacatatatgaatggctcatttcgttattgtcaccagcttcttccgtatttattttattctctagtttctggcaataatttctctatggtagagtctggaaaggctattcctcatgtccttggcttcctaagtcccataggtggtgaagaatgcccatcagatgtgttactacagagtgcttttggattgagatgagggaggggaagtgcctgatctcactcaaatgtactcaatttcctggtctgggtcacagccaggcagcacagtcttgtgggcacagtatcttcacttgccatgtttctatcaaaatgagagtatcttccttcactgtggaaaacacggggtgggcagggtgagggaatagcaaagggagtacttggagatccctaagctgccactggtttctccaaatgttttcaatccatttaattcatgataataaacacctttctacctaaccagtcataatcgcttttctcagatccaactgattcagtgataaatctaaagagaaaaaataaatacacttttccacgtttaagctgaccatgaatgtttccacctccatatcccactatgcgtttcatcttccctttgcctcactggcgatccaagtgcaagtaatgcttcacatgactgtgatccctagaacttctacctgatgactgttgacgtcttctctgagttttaccagtggaaatggcaataaatagaaacattccagaaggtcccctagggtgcatattttctgtacttcctctctaagatatgtaaaatcaattccatttgctcttgctttatatgaactagacctatggccccagcaaacaaactaacaccctgtgttgacaacttatccagtattgtctttaagtctaaatggtcacatgcttatatcatttcttccaatttcttgggataattgtcatgtcaactctttggattaagaatcatcaaccaggccaggcgtggtggctcatgcctgtaatcccagcactttgggaggcagaggcaggcagatcacgaggtcaagagatcaagaccattcctggcccacatgttgaaaccccgtttgtagtaaaaatacaaaaattagctgggctacaggtggtgtaccccctgtagtcccagctactcgggaggctgaggcaggagaatagcttaaacctgggaggcagaggttacagtgaagccgagatggcgccattgcactccagcctggcagcagagtgagagaccgtcttaaaaaaaaaaaagaaccatcaaccagaaaaccacagccctgagaaaacagaaatagagtatttcaagctgttcagttggcgttaacaatggtaagtctacagctcattttcaagatatatatattctgtttaagggagtaaaagcacccatcacggttaatgtttcagagcctccaccacttctgatcgtatagtaattcaacagcacaagggtttgtgtgacagctttgcttgactaataataggtttttccctgtctatagggaaagttgcacctgtgcacaagacaagatcataagctacacttcgctcttcttttttgaggtaaataacttgcttgatccaaagccattttatggaagaatttcctgattctgatgaaagcacttggaaaatcctcaaataatattttatgcagaaacataaccgataagaatggcaaattcatatataggaaaataaccagtgctttccttatgttacatgaggtccactagtatcacctaataccagctgttagtctgagccctgatgtatcatacaatgttaggggttcttcttgacaaattagatgttcagaaaagccggtagccctgtaggtctcagttagttgaaagtcatattattgagccccccagagacctccataacattggttcatgatactccctgggaaagctgggaaaggtgactgactgaagtccatgtgttgaatcatcctcattattaaaagccccctgctcattaatggcattttgattaatactcacttggaaagcatttttttggattgtggctcatttttgaaacatctcatcatagctcttccagaatggctttgtctgcaatcatcctgttgtgtttcttttaagacctgatgatctgttaaaaccaaaggccaatattataaaaatcctcttctctttgcaatgggatcatcagatgtaaccttacagtttacccacggttaggatttttacatttccagggcttccttgacaatggcactgatgtgactccatccagcatctattgttgtgaggactctatctggcatatcatcattgtgggcatgaacataatggagattttcacaggatgcaatggttaatattcaacgttagtcaaaatttcttctagtcctacccttggagctctactgggttggaaaaatattttcatgtaaggacaaccatttggtagagttttaaaaataaaggctaccaataaattttctgtagcaagagtatgaactatttgtggtccagaatacaattttttatggaatgtaacaaaaattatttaaatgtattcaatgtagataataattttacaaataggcttatattgcatatataatagaagaaacacaattaaacataaatactatatatatgtagccattttaacaaataagtatatatttatttatacatatcttacatacatttatgcatatttttccacaaataaggtaaattttaattttttattgaaatattagttttaattttgtcattaattttcttttaataactttataatttgattactaaatattcacatttataccaccaatttaagaaaaaatacatgtgtgtatatataggtagaggtgtaaataatgtatcagggagcttttatgcataatgattggtaactggctaaatacacaactcagtgactgataacagtaaatatttgttttcatgttcatggatgctcatgttcacaatcatctggctgatcaaggaagggctcaggtaagtggtttctctgcatggcactgagcttgtcttcagcctatacatattaattgtcttaggacaaggctgaacagcagtgactacccatgactcaagattcttctggcaggtcacaagagtgaacaacatcccaaaccaaactgcacagctgagtttaagtccaataatttctaacatagcttcacacattttaaatatattcctttatttcagtgagtacaaatttttaagaaaatgttcactccatttaattatagaggtgtttgatcattccatggacaaataactatgatttcaacttacagtattgaaaatatttgcaaatgtaaatttgcattaataagaaactgaagctggatgtgttttcaacacgtggctttaaatataatatacttaaatggcctcatgggagaaaattcattttaacttacataaatatccctttttgcctctcttttgtcctatagagttgcccaataagaggtccttccatgagatttggaaatcagaaaaggatgactcaatattctccattggtacctaagacagacacagggacagggatgaggacaggagaaacacctgaaaagatgctgtaggaagctgagagcatcagcacccccacccctaagcttccagacaggactgaggaccacatggttagatagcccatactttaggggcagatggattctgttttctgagggagcaccagagaatcctgcttctaatgtcagctttcatgactactatatccttggccttgaaaggttgcagtgtgaacgttaatgtaggaattgggtcattcttgacatacccaacagagccaagaaaccaggagggaaagacactcagggtgtaaaatattgtctgaagaatgcaattgaaataggccctattatcccatggaagtaatgtttatggttttttgaataaacatagaaattgacttccccagtcttaaaactcaagttagttacatttgtcttatctgagttcctttttcaggaaacccaccaagaggcctccagatactatcagagagctgaaacttacatatcactgaatcaggacagtgagacgtcagacccttcacacattgtgattgcctcactgaccttctgcttcctgttgacaaaattaacttcattacccctccctaattcctgtttgcccacatttcttccctgctatataaccccctaattttagtttgtcagggagatacatttgagaatggggtcccatttccacagctgcagcacctgattaaagcctgtttcttggcaatacttgttgtcttagtgattggttttatatgtggtgagcagcaggatctacaccaaatccctggcatttcagtaacaagattctctgcaagcttcactgctttggcctcttgtaaccggaaatcaaattcaaccccaacttctgaataatttaacataattctaggattcagtttgtccatcagtgcttaccattctgagcttgccagctcccaaaattttctggagccaataaactttctcaaagagcaataggtaacattttccttttttcatgaaactctaagcttctctttgttctttcaacatattgaagaccattgagtttttctgtatgccccatttagcaaatatttcttagcaaataaaacatgaaatttgagattcatctctatatttttatttagacttccatagtttatactctatttctctgtatcaagacaattcctgcttagaatatctatagtggcttcttctctgttacttgaattccaactgaagccataaactagactcctcaggtgtcatgatccctgccttttttaaatcaggagaggaactgttatgtctgtgcacctggtgctgagaaagaaaaagaaattgggatgcagaggtgacttcacatccccctctaccaacaccatcagagtgtgcctgcatctgaggaacactctcagctgatggaggaatcaggaggagcagctggggcagcccggcctcacatgtctgcttccctgggggtttatgttcaggtttgtaacactgtgggagggtaactattaagctgttgacagtaataagttgcaaaatcttcaggctgcaggctgctgattgtgagagtgaattctgtcccagatccactgccgctgaaccttgatgggaccccactttgcaaagtggatgcagcatagatcaggagcttaggggctttccctggtttttgctgataccaggctaaataactgctaatgccctgactggcccggcaagtgatggtgactctgtctcctacagatgcagacaggaaggatggagactgggtcaactggatgtcacatctggcacctgagattggaaatataaacacaaatgtccatagaattaatcatgttgtaagagaacttccctcaagagccaggctgtacggaacacactgggctgagtaaattcctagtgttctccttccttacctgggagccagagcagcaggagccccaggagctgagcggggaccctcatgtccatgctgtgtcctgactgggactgactcctgcacaggtgtgaccagcctattaagaagtctttagggcagggggtggtgctctgggaacaagcaaatcggcagggggtggggcaggctggatacagctgcgtggctggcttatctcagtaactcagcacaggggcagtgtccccagtgtcccaggtcagaccagggcacctagatttgcctgcagagaatgtttcttcctaaaggatattttgttaccaagtacatttttgagcatttattggcaaatctcgaagtggttgtgagaactagatggaataatatatttcaatgccgtattgggcataagtaggagaatatccttgtttgtagagaattcttaataaagtcttagagagtggggctatcaggtcttcaacacactgtgaaattgttccagttgggagcgatactttgtgacatacatactacatttttgtaagcatgaaattgatctttttttaagtaaaaaagaacacttagtcatgagcaagtaaaatgttctcaaaagcattttgtaatggccctaaaccaatgttattaccagtctaagctgaagaggtttactgcagattgacaaagaagatgatattgggattccttaaagcatatgacatccacagttcctgcattgtccagagctataagtctctttaatgctcgagttttaatgggattcattttattctctgcttggggacccccatattctacccccttttctgtcattgtgaattatttcccatggtccatcagcataaaagtctgactagcaatgctaaatctgattactttaaaacaattttttttcttcttctactacaggagccttgattagcataaacttgaatctttgtgttagtttgcttaggataatggcctccagcaccatccacagtgttgcaaaagacatgatctcatttttcatagctgtatattaagtattccatgttgcatatgtaccacattttctttatccaatctacaactgatgggcatttaggttgcttccacgtctttgctattaggaatagtgcagtgatgaacatacacatgcatgtgtctttatggtaaaatgatttatattccttagagtatatatccaataaagagattgctgggtcaaatgatatttctgttttaagttctttgcaaaattgccaaactgctttttataatggctgaactgatttatattcccaccagcagtgtataagcattctcttttctccataaactcactagcatctgtcatttttaagtttttaataatggccattttaactggtgtaagatggtatctcactgtggttttgatttgcatttttttaataattagtgattttgagcactttttcatacgctttttggccgttaatatgcttttttgaaaagtgtttggtcatatactttgtccactttttaaaatagtttttttttgcttgttaatttgcttaagttagttggaggttttttaaggaaaaaaccagaataagagaaaaagaggaaaatataataccacagaaaacacagactgtggtaagtattgcctcatggatatatatgtgtgtgtgtgtgtgtgtgtgtgtgtgcatatatatatatatatttatgatacatgctgtgtttatgtgtataatgatgatccagaaactaaagggtgactggtttaaggactgcctatgttgcactgaggcttccttcttttcaaattatgaactaaagggtacagcagtacttgcatgactctcaaaaattctagcagcatgagatagaggtagaggagatttactgagatagatgcattggaagctgtagaagctcgtcctgtgctgttgtggatgttgtgattgtagtagttgttgttagtacagtgggagtaaaagcagcttgaagatttacaagctcttctcttcctcatacttacaactccctctagagatgcatcagtgattgtacaggcatctctgacacctctggagaaatcttgttagctcaatccagaatcttacctgataaatgttttgagtctcaaattatgtgaaactagggtgtagaaaaaggactagagcaagggaaaataatgttcatgcctgcacagtggttgtagacaggtaaatggggggctttataagtgtgatgatgtgccaaacctctgtcaccacggggagagaagcatcaaaccaggatcacttctggaagaatcattaggttattttagatggaaggaactgtgaattccttgccaaatagatttttaaaattcaaagctactcattacgtgttaatattatttaacttctttaaatataccatgtggtagagggcacatccactatttcaattcagggtttgtatgcctatgtgaattacaccattaaaaacacagcaaattccatattggttggggaagaatgtttgaacagtaatcaatttcgtgaagaagaggtttatgtcacagcactttccacagtattacatacaaaaacagtgaatgatctcatatccacaagaaccagcatttctcatgtgccacatatgccctcccagaaagaattgaagcctgtgacaagttgatgaaaggggtagaaaaaagaataaaaccccaaaacacagcactataaatggaaaggggaaaatcattgcagagcctatgattataaaaatacaaaaggtggatattctgagtatttttatggcaactagcttgacagaagtaacaataactttgtattataaatttacccagaacgaaatttccaattttatatctgcctgactggtgtcttgataccttatcaaaattacacaaattttcaagagattcaaaaagaataaatactcccaaacttatcatatgagatcaccatatactccagtccaaaaacaaacaaggacgtaacaaacggagaaattaaatgctggtatctcttgtgaacataaacacaaatattctgaaaaatagggaaagaaggaaaatataatcatttttatacctatatgtttgtgaacacacatggttaagtgtattacagtttttatgctaagaacacttgatatgtaattacaagttctaaaaaattgatatgaaacggaagatgtgacagttccattttcctaacttttaaaagaatatttcatcttatttaaatattatttttatttttgtatgactttttgttttgcttagacttttagttgaaatgaataatgaatgtgtattaaaagcctaccattttgatttaatctatgaagggtatttaaattctcattctatagaagaaaaatccaaactccttagaaaagagagatcttgccaagagctacacagttcttgtttcggagctgagattttctctcagatattctggctcatacaattttcagtacactacagatagaagatgcaaagacaacattacccaattggtcttgcacttactttgttcactgttaactaagtttactgaaaaaaaattacaataaaatacactgtcaaagaactgtcacaaataaatacatctgcagaaccacctccaaaatccagacatagaacatttctataactcccaaaagttttgacctactcttttggaatccacttgctttccaccacacagatcagggaattcttgatctgcttattgtcagtgcagattccaatttctttttaagggtttcatataaatgaaatatagcatgtgctcttttgcatctggtgaattttgtgcagcataactgcttctcagattcattgagatgtcatgtgttccagttatgtgctcctttttatttttgagtgttatttaactgtttggtaattttataatggatcctttcacctgttgattgccatgtaagttgtttccactttgggctattacggataaagctgctatgaatgttcttgaacaagactttgtatgaacatatctctttatttcttttgggctaattcctaggcgtgtagttgctgggtcttacagtaagtgtttaatactctgttcaactttttccaaagtggctgaaacattttacatgtccaccaataacttattatagctccacaccctccaactgctgttttgattttttttttaagatttcacctaattgtcactcaacagtaaccagaatagctagtgattattaagctatgtttttctgactattttcttgtcaattttggtggttgatgtgtttcaggatattgagaatagaatcaatgccatccaagctccttttcaaataattttatcaagccataatatttaagatggtaacaaggtatatacaaggtgtgttgggagtagtaataagtgttttcaacatttattattatcgtactccataaggcaatatgtcttcaatgaaatagtgtttaactagacttaggatagaaaggttctcatctcaaccctagtattcaatattaggaaaagtttaaggaaaaaaaaaaacatccaggaaaataagtcagagagtgttttgctagtcaagaaaaactgcaacactgatgctcttttaatgccagaccttcacaataatttccactcagatcatttggtggcctccttgccttgttctccttatgggacttcattctgagggcatgtgacatcacagagggagcagtgcacttgggtacagaaatatggcttaggggattgtctggccttagaggtggctgcaatggaatatacattttcaaggaagttccctgttaaagctgataaattgttagttaaggcaaggtgcaggggcttatgcccgttatcctagatgtttgcaaagtcaaggatggaggacagctgaaagccaggagtccaagaccagcctcgaaaaaataaggagatccccctgtctgtagaaaaaaaagaatgtttggtaagatgtggtgtgaacaatgacatctataagagattatttattaacatttgctcagaaaactagaaaatagaatgatgtcttataatccatcaatatcataataaaaatgctaagtttttcaactatggtaaatatagagaacataacattgcccatcttagccatttttaagtgtacagggcaatggcattaagtaagtcacattgttgtgctatcatcaataatagcaatctccagaactctttccatcttctaaaactgaaactctatttcaattaaatgacaaccctctccccatttcccctgcttcaagttcctggcaacctccattcaagttctgtctctatgacagtgactactctgaagcaggttcactgtgccctggttaccaacttatcagagtccagggagacagaacaatcatacacaacaagttacaagaatctggtgtagtatttataggtggccaacaagggactgcagaagcctaggatgtattgtgggtctgtcccctgaggcacaggcatgtgggtctgatggaatcttgactgtgtgtaccccagttggaccacaactcagcaaccccagaaagaagatgctctgggtttttaatcctggtgtcacaggacacatggagctaaagtactggaggactaaagtactggaggacagtactaggagaagctggaacaggggcaggctcttctgaccagtctctccctatttcagaatgttacatttccagcacattctacagttgttcttgagaagtgtaagaaagagagtggggagaactaactgagtcgagaaccattagaggactgtactggagtcacccccaacccaaacacccccgttagaaagccattccattttatatgcctactaataaccctgaactggtggcagaggtgtgtcttgtttgactgatgaagcccctcgacgaacacaatgtcaaagcaacatcatagagccagagccagaatagatttcactgggccaatgaaaactactaccagaggcaggatgatcaggcccacctgaagcagttatgtagcccaggatccaatgatccacagaagaagttgctaaaggggtgaaagaagaatccttcaggtgggaccattttcttcaattacgagcctgtttccagatctcctctcttgaatttctaggatacctgaggtgtttgtccaggtacaacagaaagtgttggaaattgtatacaatcctcccagttgggattttaaaaaagtctagagcaacactgttatctaaaacatccatcccgatggagttaagggatgtctgctgggctaccaaggcagtggctatggaggaggagccatatctgccatggtcagggacacatttcttatcatttctcttttttacatgagcactgactcctatacatagtaccaaaaatatcacaaaagacataaacccatagtctgttataccttctggcaggtccctagtaagtctgaggtacagctttgggctgcaggctcaatggttcacctaattccaaggagtaatatccagagacaagcccagcatgcccaacatgcagaatctcaccatcccacagttatccagagatggcatcacacatcctgcattttgttcactcccagaccattcacagagaaatatgtagcccttgggtgcatacagccccctttctcccattttattgtttaatcacccagtcatggttatgcaggtattggtgtgttcattagccaagtctcactgatggcagagttgaaggagcaaagttttgctcagacaatattgttcatagacagagggtagcattagtcctctccttgtttttgtctttgccattggggcatttcttatctatgcaatcaaagaaatatggtacatcaaaatatcagtccaccaatgttttttttagttgtggtcatgacatttgccacagagtcaatttagttaaatggggggcctccagttttctcccatgtggtaggtatcacatcctcagttggtaggccagtgcccgggtcctgttgatgtacaccatgatatcagtaatgttggtgtcatttgccttcagtagaatgaaaggaaacctctagttagtgacagaacgaggtcaagaatggcagattcagtattttgaaagattacactcggtgacttgcaagaagctaacaaagatgttatgcttctaggcctttgctgcctcattcttgccaaaatgcagtgtgacaggttagtgcatcatctctcacccatcccagggtctcaggtgtctcctacccatctacaagggttaggctgtgttggtgtaagaatgcggcctggctgtccttgctctgtgaaaaatccattgcctttgtcacttgacccagacatttcagtcctgattgtccactgcaggaagggagattatgccctgtaaaaacttgacatatttcataatatcaccaatactaaaggaaggataagatggccctggcaccagaagagggcccctagctccctgatatttcttagtcttgtcatccatcctgtgggatcttgtagaaaagaggcatttagaggaaacataatccccatattagagttagggggcctgtctggggtaagatgatggcctgaattgaaaatcaccccagggcatgcattctaaaggaaaaaaagaaaaagaatggttaggaacactgaaatagctttcacaggtccagactaataaagggtctgcctggtctaccttcgtttccactcagcattatgttccttaacattcattatttcccttgttctggagtgcgatatttaatgcccatattgctctagtaagatggggtaccaccccattagcagactttctagatgtcctttctagatgttgctgtgtgagtccattgttctagcattcactagattcattggcctgtggatgcagggtgcatggaaagttcatcgtgttccatgagagtgtgcctattgtcatgttgcttgggcagtgaaagatgctccttggtcagtgtgaagtgtcattgggtatccaaaaatatgatgtaagttcctttcaagggtgaccttggtagtcccggcatccaattgagcatcgtatctctttttcctgcaggtggaaagctgtggccatagtcctttcctccacaccagggattctttaaaagtccagtctctcagttgccattttcctgaacagatgttgaggctgttggcaatggcccatgatttagtgggaatgtggcatggtacgatgttggaacagcctgcatggccattaccactgaatgtagtttgacccactgggttgaaatcccatgctaagtttcagttaaaaaagtggccatccattggctgaatggtggccacacctggtggacctgtcagtttgcgttttcctcagccatcagtgactcctgccatatggaaatctctgaatcttgggctcgacatgggtaaatgaaaatccaaattatcacctacaagtcatttggtcccttcaacaacctctccatttgttcatggagccacagatcctgtggggtcctgactaagcctgatcaagaatgtgccatttccatttgataacctgactctgttgagattgttactgccttgaaagccaggcaggcgcttctcaactctgtgattcttcccaggaaatacgtgagaacttccatctgggttcatatctcaaacacaacccaccagtctctcacttgctgccctctgctcaaaatcttcacattgtaatttttcatggggtaaaaagttagcttatatattatcttgtattcattcaaattctgtttaaataacatacatatgttcctttattctttcgaactttgtccttatttttgaaacccagctttggagttcagaaagctacttttgtacttcaatatgctgtgagtgagactgtgcaaacactttagcaactaggtctttatttttgcatacatttgccacaacatatctagtaattaaaaaatctagactgtgaagagttttatttggcttctccctgaaaaaagtaggataaaatacagtgcttgctgctgttctggtcaagggtcggccttacaaaaagtggaggggggaggtggaggaggggagggaaactgatttaatatcaccagatcttatcaatgtacatgtactctggtaactgctaaaccaaatcaaaagaatgtgttagttttgtgttgccagtaatcagtctcaattaggtgcctgttatgcagaatgaatttagttgatgaatgaacatagggaaggaagagaggattagaatgagctctcattgagccttctcttctcttgtgtctcattgctcagagggcacgtggacctcctccatactgcagactctgtcatgcaaaggctgctgcagctgacgggaccttaaaatgtggtgcctgaggtgtagccaagaaatttatggtcatgagccctcagctgcaccaagtcctctgagttctccaacatcttggtctttaggcatctaagagaatccacagtgcctgctctccacagaaacagcacatctgggcagctaggccacagcaagtgggggggtttgtgttcaagactataccattgtgggaggataatgtgtactttgctggcagcaataaaccccaacatcctcagcatccatcctcctgatttcagcatgaaatctgtccccaacccactgccactgaacctgtctgggactccagggtcgtgattggaaaccaaatagattgggagccaaggaggctggcctgtcttctgtaggtaccagttgaaatagatgtatccattactgtgaagggggctgtgactagacctgcaggagatggaggctggctctccaggggtgatgggcagggagagtggaggttgggtcatcacagcatctccattggatcatgaaataatgagagagaagtgcaaggttatgtgcaaacattgtgagtcattttaatcattttctgtctgttatttatgttttgctcaattatttttgtgtgtgtgattttgattaatcctcccaaaacatacagatttaaaaagaaccaatatttacatatccttgctccttctggaatcttcctcactctcacagatctagacatcacatgccccatcctggaggacaagacacatctaacacgaggacaggacacacatgggaggtggcggggtccacagagttcaccctcccaccccatcatcctccctcatttcccttctgcccttaccagggacccagagcattagcagccccaggagctgagcagggagcctcactgtgagaaggtgaactgaggagtcctgatcagtcaaggcaaggttagagtgagctttcgtctcagactcacaaggaaagtcctccctaggggacagtatgcaaatcccctggtgggtgcagtggggtggaaagagccaaggagaaggtgggggcgtctcttgtgagcaaaatgacataaatatattttatgtttttaaggaaatcaatagaggtaaaatctgtgttgcctgagtggcagaagggacgtatttagattttcctgctgtttcctctactagacttctagttctttaggactttctcgggcatgttttatgtttctttttaataagcttgatctttcataaatatttgatgattcttatttctttgtttaggtttatttaaaagagtctaggtttgtttattttattttattttattttattttattttattttattttattttatctaaggtaaaacacacagtgcaaagggtgcaactcttaagggtgcaaatgaatgtcaagatccagatcatttcatatcatgatccacatagaaacgcagaaggtttccaattctctcgctgctttcattatgcaccttcccagtcaaaaactgctgctcaaaacacaatcaatgtaaatgatattctgacatataattgttttagtcctggacttaatctttatatcaggtaaagtaaacattttttgtagcttctttctaacttttttcattttttgaggccttggttccttcttgtcaatttgagttgctgtctgctgtcattctctgttattctgaagaattttctcttgaatctcttacaaggcatatatgctattaatgaattaatctttgtgtatgaaggaatatttctaccttgcttttatatttaaacgattgtttttctggatatagaatttgtggctgagaatttgtggctcagtatttaaaaatatcattccactgtcttctcacctccatttgtaatggtgaaaatttagccaatgattttaatattgcttcttagtataaagtaagtcggtattttagtgatgcatttcaaattctctgggtctttgtctttcaacactggtactataatgtgtatagttatgaattgtactgtgcttatcctaaaagggtttcactgagtttctttcatgtatagattaaggtgtctcatcactgtaaaaaatgtttttcattatttctccatttttttctttttcaatttttattttaaaatcagagcatacatgtacagatatgttacaaagttattttgcatgatgctgggatttggggtatgactgaacttattaaacaggtagtgagcactgtaccccataggtattttttcagcctctgcccttcctccctttgtctcccctctagtagttcccagtgtctattgtgcccatcaaccgtggattggataaaaaaaaaaactgtgtatagatacaccatggaatcctatgcagccataaataagaagaaaatcatggtcctgcagaaacttggatgcagctggaggtcatttacctaagtgaactaatgcagaaacaaaaaaccaaataccatgtgttctcacttataagcgggagctaaacatggggtacacatgggcgtaaagatgagaacacagtttttagcctcttcctgtcttctcctttgtgattcctaatacaaatttgttggtattgttcacagggacctataatgtctgaggttttattcattcttctttataatttttcccttctttatatgaggtcatttctattgacttctttttcagatcactgactctcgcgtcatgttaaattgctgttgagtctatctaatacatttttcaattgagttgtacctttcatttttcggattcccagtaggtctgttttcatagttttgtgtctgtttgagagcctctatttgttgaatcattgtctttacaaattcctttttaagtcttttattataggttaaaataattatttgaacatatatttgataagggtggagcacacagacaccatggagatggaccataaggcagggagctcagaattggattagttgaatttggagtctctgactagatggtgctcttgtgagatttaattattttccatgtttcatgtttctcacaatacaaatagcttttattttttaagatggtaactatgaacagaaattcagcttataaattcctgggaattcctaataggaaaattgatgaaaaaatggtttttcttaggcccccacacctgcctctgcctgggacctgactttgtctctgagccggcggaatctatgatgaggttttgagttgggcagtgaaatcatggcagggcaggctgtgctctgggtgctgtggagaacaaggggacactcctgcagggttagtgatgctgggagttcaaggggagactcagcatggagctgcctgttgagtcaccccagcaatcctgtctggacagtgatcatctcacaagtgtacttggatgccagtggatggcccaaatgtgggttcaggttggacaaggacaaagctttagggatgaacatatggggctcatttgatagtctgaagtttcagcacaagcgtaatgaatcatatgggaaaagaaaggagtcacaaggttgtgacttttcatttgatattaaaatatattccctctgctcatttttccctacagaatgtaactactgttacatatttaaccaaagtcattgtttttaattttcattttagtaactgacagcctgtgtgcagagttcctaaataactggaaagccaggccgtcattcctatggctgaagccaggaagtgactgtggatatgaagaaatgtgagtttcatgtacatgtctctaaagccacgggccactgatctggtgggaacctgcagtcatttcactttctcatacccagatgagaggacaccttgatctgtgttcatctgatgatctgatgaactctaaaaactggaccatattctgaaggtctagttcacacttcttttctgtgctagagggactctactcacatgtattgtacactctgcataggacagtctgtgatacatacaagtttttttctgctaaatactcatcaatcttgtcatttatgcatcttctatagttgttacctgacctatggctatggggtcttccaaaagaatgggccagaggtggagctgtgaaactgtagctgaataagaagtgtaagtgtcaagatagggtaaagaagtgttgataataataatatttcaaattagtctgggctcttggctgtgattactggtaagtgggaaagagtctaggtttgttttttttaagttttattttaattgataaagtagccagggtaaagtgcacaaatcttcaatgtgcaactgaataaagtttatgtgtaattcattgtccaggtggaatgatagaatatttcacatactcttgtgcttccctcatggacaatctttgtcagttttcgcccctcccacccagccatagtaactgttattctgacatctaacacaatcacttaggttttcctgtcttgaacttcacataaatagcattaagtgtatttttctctttttagccttggtattgctccttacaatgtttgaggccttcatttcttccagtggactcaaggtcctgtctgatgtcatttcctgggattctgaaggattttctctcaaatgtcttataagacatagctgctatgaatgaatgtacttttttatcaaagaaaatttttttttgctttttctttagatgtgaaggtattttcactggatatagaattcctagtgacttttttctcctttcagcatctaagtatgtcatttcactgcttctaatctctattggtcctaatgaaaacttagccaataacaatatgttgtttctgtgtattggttgggagatgatgtttgacagtgatcagtttgtgaagcagaggcttgtgtcacaatactttccacagtactacatttaaaaatggcgaatggcctttcattcttgatgcagtgaagattttctgtctttcaacattttaatataatgtgttcagttattaatttctattatctaaaagggttttattgaattttttcatctaagaatattttttattacttttgaaaagtttttgtcattatttctccaaggatttttttttcagccactttctctgtctctcctcctttgtgactctcattatacttttgttggtatccttcactctgagctataaatctctgacgtcttcctccttttttttaaacattttatttagactcaataagttctattcctttattttcaagttaactgattattctgccatctcaaattgctattagacctagctaatacgtatttaaattggattattttacttttcatttctagagttccaatttggtcattttttatattttccatatcttttcttgaggccctacttgccaaatcttcttaatattttcttttttatgtcaatgatcatagttttaaaaataattatttgaaaatctttgtagtctttactaaatccgataattacggcaagttagaatcagctttcgttgactattttctgttgtcattattgtagttgctttatttttgttcctttaatattggtcattcttctagtttttttcccaggagctgttaaactgacaattttacatttttgataatacagtacctctctttagattatgggttttttaattttaattttaattttttagaaatagggtcttactctttcacccaggctggagtatggtggtgtgatcatagcttgctgcagcctcaacctcttggggtccagtggttctccagcttcatccacctgagtagctgggactataggggcatgccattactctctgctatttttttttttttaaatagtaagatattttgcccacccagcctggtctcgaactcctggcatccagtgatccttctgcctcagcctcccaaagtactgggattacaggcttgagccaccacgtcaggcctggaatttgttttgtttttctgatcattttttaattttcttcttagttacttgggtgaacttactgatagtacctgacttatgatgcttggagttataactttttgactttcagatggtatgaatgtgatatgcattcaagtagaaatagaaattctagtatttatacaactattctattttctctttcaatatagtattcaataaatgacatgaggcattcaacactttattggaagataagctttgtgtaagataatgtcgcccaagtgtaagctaatgtaagtgttttcagcacatttaggataggataggctgagctataatgttaagtggattagatgtattaaatgcatgttcattgcatgatattgaaaaatctatctcacgtggtgtttgaccactgatatcactgcttccttttattcttaatattaatatttagtttgaatttataggaactgcacatgtatctgcatagtgaagtggtcaccaatgatttgagacgttttgcttaaatatctagaggttataaatctatcttctgtcaacccatctgtgtgtagtttaaaaagcaaactgcatgcaaaatgcagctagttcttgaatccttctggttttactttgcaccggaaactccttgttctcatcactcatatctatatcttctaggtcactaggaatgtgtgcagagattatttcagcaatatgggtctatctcatccaggaatctgctatttactatcagcagatgtactacttgcctcaaacaggtcatcatcttggacttgtaaagctgtgagatttttctgttcatttcctatggagttctgcatgtttagctggaaacactgaataattttttttccactccttggctttactcaagtccacccactttggcagcaagctgctagttttttttgctacgctcatattggtaaaacttcagttctgtaattcatgctgattgagctgggggtagaaggctgctgtcacaggcaaaaggctacagacattttctgtccttactcaaagcactggtactttttttttctataaagaatatgcatccttaattattttatacttcaccaattttcagagtgctgaaatagttttgatacttcagctttatatttaaatgtgtgtttgttgtttatttttgcaccgaagatttattaaactctttgtgatgccataaacagagatgccttctaaaatgcatttagttgaacataatagccacggtgaaatggtacgatgcaatggactaacataagtaattttggacttgacaacttgaactccaaaatggccaaatagagctgagatgctaacactgagtggccaccccactagctgtctgtaaaggaagcagctggtataataatctagtaaacactgatggtcttgttggggtttttgtttcatgtggaatcactgtgggaggccagttgctacgctgctgacagtaataaactgcaaaatcttcaggctctaggctgctgatggtgagagtgaagtctgtcccagacccactgccactgaacctggctgggatgccagtggccctgttggatgcatcatagatgaggagcctgggagcctggccaggtttctgttggtaccaggctaagtagctgctaacactctgactggccctgcaggagagggtggctctttcccctggagacaaagacagggtggctggagactgtgtcaacacaatttctccggtggtatctgaaattggaaataaaacagaaatgcactcatgtaatcaagatcaaaccaactgtctttgagtagagccaaaattgttgatatactttgaattttaattatatttcttgctgagcagaggtggcaagagttttcactaatgtgcaaaaccacctcatgttcccctcacctgggagccagagtagcaggaggaagagaagctgagctggggcttccatggttccctctgggtcctaactgagcagttcctccccagggctctgacacaggcattgatatgggctctggaaggtagggcagctgggagggacatgcaaagcagctgggtgggagctgagcttccagctgcagagaccacctgcttcttcctctctgcactgagcatcctgcgccaccctggttgtcaggccagaaaagtctgttggctcagtctgagtgtagaacttctcccttgtgctcagagaatttcattcctatgtctttcttctcctcaatcacctaaattcacccagatgatgtttggcacaagcctgttaagaacaatataaaaggctgtgttttcatttctctcttcctatcctcaatatgcccagtcatctccctaagtgcattattggatcgatggaaatgaggagtctgttagaacttaatcttccagatacacctttcatttgcttgttagtaatgttttctgagggtcctgaaactttccattaacccagacacataccctctttgagttaaaaagttaaaacttctgtttacagtcacatgtcctggcagccctgacatagatgctccatggcttgccgattgcttgaaattgaccaactaacttaacttccctgtgtctcagtttccatatctgtgtaactgtgacaatactggtgcctaccttacagtgctgtagacagtttaaagaaaataagataaaacatttacagtagtactcaggacattatgtatgcggcaattatttttgtttttattgattaaatatttagcactacagtcatcatcattatcataaatatacttacttggcacagaaaagagtcttcaatctaatccaagaatgttttatcaacagtcaaattaaattctagggctttttcttcactaactgtacacaactcttaaaatcctaatgatttggtcttaatctgtgctaaaatgctcagaccttcaatcattcccgcccatctctgtctaacgcattaattctcatcatccattatcaaaatgttatcctatgaaagtttcccatgtcctgctgctttccttctttcttacataatctttagtctaccttgttatcttttgtcttatttttgccccaggactgacaataaggaaaagctaccatcattacttgtggacttgctccagtataattttgtcaggcttgttatcttggaagtgaggactatgtcttgcaaagaaacatattcattgggtcaatgtgttatcaaataaaagattttatctacttatcatccaataattaatttagactgacttgaacagattttttttaaggacgaaaaggagaagatgatataagaggaaaatacaatacaatatcaaatgctagctattatgactcttgcttcatggatttttacatatatattagacacatggtgggtatatgtgtgcaatgatgatccaaaaactgaatgctgactggcataaggaatgcctgcattacactgagtcttgtctacttttccaattatgaacagaaagctgcagtagtatttgtatgagtatcaaaacttctagctgcctgagatagaggtagagcagatttactgaaataaaagccttggaagtaggagaggttcgtcctgtgatgatatggctgttgctctggttgctgttgttaggaaatacagtgggagtgaaagcaagtagaagattgacaagctctgctcttcctcatactcacaaccccctctagagatggacagatgctggtacaggaatctctgacacctctaaggaagtctctttgctttttccagaatctttcctgacaagtattgtatgagtcacagatgaggtggaagtgggtgtagaagaaaggactagagcgagggaagaagttttcagtcccaggtagttgttgttgccacggggaaactgaatttttcaaagatttgtgccacacttctatcgtgttggggagagaggcatcaaaccaggctcactcctgagagaatcattacattattttagagagaaggaactgtaaatttcttgtcaaatagatgtttaaaattcaaagctatcgagaccatcccggctaacaaggtgaaacaccgtctctactaaaaatacaaaaaattagctgggcgtgctggcgggcacctgtagtcccagctacttgggaggctgaggcaggagaatggcatgaacccgggaggcagagcttgcagtgagcgagatcgcgccactgcactccagcctgggcgacagagcgagactctgtctcaaaaataaataaataaataaataaataaataaataaatataaaaacattcaaagctactgattttgttgttgttgttgttgagatggagtcttgctctgtcacccaggctggagtgcagttgcatgatcttggctcactccgtttcccaggttcaagcgattctcctccctcagcctcccaagcagctgggattacaggtgtgtgccatcacacctggctaaattttgtatttttagtagggacggagttttgccgtgttggtcaggctggtctcgaattcctgacctctggtgatctgcgcgcctcggtctcccaaagttctgggattgcaaacatgagccactgccccggccctactgatgtattactattattcatcttcttgaatacagcaagtggtaaggtgcaaatccacaatttaaacttgagatttctactcctatgtgaattataccagtgaggaacagaaaaattctgtattgtttgggagatgatgtttgacagtgatcagtttgtgaagcagaggattatgtcacaatacgttccacggtattacatataaaaataacgaatggccttaaacccagaagagtctgcatttctcatgagccatactaccaccaagaaagaattgaattgaaactcgtgactacttgatgaagggtgtataggaagagggaaagaaaaaggacacaaaacataatattgtaaatggaaatgagaaagtcattacacagcctattagagtaaaaaaaataaagagaggctaaatgagtaactttttggcaactaacttgacaaaagtggtgcaatcttcacctcctgggttcaagcaattcttgtgactcagcctcccaagtagctgggattagaggcgtgtaccaccacttatggcccttttttttttgcatttttagtagagacatggtttcaccatgttggccaggctggtcttgaactcctgacctcaaacgatctgcccacctcagcctccgaaagtgctgggattacaggtgtgagccactgtgcccggccttaaagcagtattttcatttagtaaagtgtagaagaaaaaacataaataaagtgacaacaagaaaacaaaatgccattatgaaaaatggtaactttagggcagaaaacaagaaaaggcaaaccaagattctcataaggtaagcctccaatccacaatcctaggaggaatgtcaatgctgaaaaccctggagcatccagggagtggccaaaaatactaaatgctgaaaacccagagtacccgagtatcagcctatgagtgtccccacaccaaatgccaggaaaccctggaatatccaggggctgaccagtgcagaaaatcctggagcctcagttgggtggccaacagtgagccccaaaggcctgattgggaccacagaacaatgtgactctggcttcttacggccaacagaacaggagaattcttacatccaagtgtcctgccttaaacaattgcacaaacacaattagcagggagccaaagccaaaactgcaaagcaaacacatatatcagggcagaaaataagataaaatggctgatggataaataaaatggcattagaggagaaatgactaagagaaggaccaaggaggatgtagtcaggtgtgctatggaggacttcaaatggactatcgagtcaaaggccttattccctggatcatccaatataggtcaggtgggcagaggggacacttacaggtgtgcaggagccaaaatggtgccaagcagtctctaacgtggggcctgcgtgaaaatctctccaggctccccagcttgggtgggttgggctcctacggggaactggagcacggagcggctggcctgcatgaagcagtggctctgtggccacttgcccatccccagggctccaccgcctgtcaggaaagatgatggctcttaaaacagcctttggctagtgttaacagctctgcaatgttagcaactctgtagctttgatcgctgtagcactgatcaccgtctcaccctctctcactgatctctgtcttcccaattctccaatagctgtcctgctcattgctgaccgctatgtccatcttctcacaaaatcccatctcttgctgtctcttgttgtcttgctttctctgctgtttctgctgtctcactgccacatcagacgctgcctctcaccatctctagagttgagtggctggcttaatcctgatgcaaggcaagttcttggatttgctcgggaaagaacgttagagtaagccggtgattgaataaaacagctttattgatggggcagcagtgttacagctctgtgactaagcctgtggagcaggcataattcataggcagagggccaagagtagcagccaggtgcagttttacagtcacatttatacccacttttaatcatgtgataattaaggggtgggttatcgagaaatagctcgaaaatgggtcgtgttgccccaacttcccggtgttgccatggcagggcagcaatttccaggtgttgccatggcaaggcgctgcgacttctggatgttgctatggcaatggtaaactgtcatggtactggtgggtatgtcttacggagaggtgttttcagaatcctattcctgttttggccagcctcacatctggtccagagtgaagtgctgcctacctcttacctcaaaagtaacaagaaatctgtaataacaagttacccagaaaaaactccaaattttatttggtggttagtgacatggtacttatcaaaattacacaaactttcaagggaataaaaaaaatactcagaattattataggaggtcataatgtcctccagtccaaaaattaatgaggacataacaaaaaaaggatattaaaggctggtatctcttatgaacatagacacaaaaatcataagaaaaaataaaaatggaatccatctgtgtatctacacatttagtgaacacacgttgtaaaaagtgttacagtttttacgataagaactcttgataggtaattttaatttctgaaaaatttatatgaactataaggtatgttggatctctttccctaacttaaaaaatatttcctcgcatttaaatattttccaatttttaataactttttattacttagacttttagttgatataaataagaaatgtgtattaaaagcctaccattttgatttaacctatgaaacacatttaaattcttggaaaaatccaaaaatacctagaaaagtgagctcttgctagaagatacacagttctttagtgtcaggctgagattatctaccagaaataacttttggctcatgtagctttcagtacactgcaagaataaaagatgtgaagacaacattacttaattggatttgcaattactcactattcactattaaccaattttattgaaaaaaaatgattccaatcaaatactctgattttaaatgtactgttgaacaagtacactcgtgtaaatgcctccaaaatcaatacacacaacatttctataactccaaaaagttttgtcctgctcttcaggaatcaacttgctttccacctcacagaacagaccatccttggtcagcttattgttagtatagatttcactttctttttaagaattttacataaatggaatatagcacgtgttcttttgtggctggtgactttcatgcagcataattgtttcctaggctcattcatgtcgccctgtgtcctcatgatgtgttactcttcacttttgggtactatttaactgtgtagtaatttcacaatgtatcccaccacctgctgatagatatgtgggttgtttccactttgggctattatggataaagctaccaagaatggtattatacatggctttgcatgaatatttctttatttcttttaggcaaatacccaggagtgcagttactgggtcttacagcaagtgtttaatactccaccaaactgttttccaaagtagttgtaccattttacatctcagcccagaattgatgagtgttctcaatgtttcagctacttgtttttaagaatttttcttaatcttcactcaacagtgaccagaatggctaatcatcattaagtcatgttttccttacaattctcttgacttttatgggtgcttgacttgtattaggatattgaaaacaggatcaatattgtctaaaccccctttcaaacacttttcctaagtcatgatatttaggatgataagaggagatctaaagggactgctggtagtagtaacaggcattattcaatatttattatcatactccataaggcaatacattttgagtgaaatagcattcaattagactcaggataaaaagcttctaatctcagctttagcattaaatattaggaaacctttgagaaaacaatccaggaagacaaatcagagtgttttgctagtggagaagtgctgcaacacctaaaccctattaatgccagatctttgcagtgatttccactcataaagttgggttgactccttgccttgttctcctatgtgtctgtgtgacttcatgctgaggggatgtgacatcacagagggagaagtgcacttgtgtacagaaacatggcttaggagattggctttggaggtggctgcaatgaaatatacgttttgaagaagttccctatgaaatgtcttataaactgtttcttctggccaggtgctcgggctcacacctgtaatctcagcactttcagtgaccaaggagaaaggatcaggatcatgtaaggccaagaatttgatgcaagcctgggcaacatagggagaccccatgtctacaacacacacacacacacacacacacacacaatttgtgaacaatgtcatcacaaagtgattatttatgaacatttgctcagaaaagtagaaaataaaacaatgtcttctgagctaacaatactataataaagacgttagttatttaactatagtaaatacagagaatataagattgtctatcttaaccatacttgagagtgcagagaagtggcattaagtatattcacatgttctgccattattactgacataatcagtaaaaatcttttcatcttataaaaattaatatgtataccccttaaacaatactccacccattttctctatccctacctccagcaacctccattgcagttctgtctttatgtcaatgacatgtttgaagcaacttcgctgtgcactggttaccaacgtacttgagcgtgggggaagagaacaccccccacagcaagttacatgaagtgggtttattattacagataagcagcaagggaacacaaaattcttggactcattatgggtcagtcccccaaggcacaggaaagctatgtggagctgatggagttgactatgtgtaccccacatacaccacagtgcaggaactcaggaaagcagccactctgggttttgtatcctggggtaaaaagacacacagggctgaagtgctaatggacattctattctatgggaaactggtatagaggacaggtaggttgttctgctcagttcctgtctatctcaggatgttacaattccagcacgttctgcaattgtacttgagaactcttaaaataagcaagaaagtggagagaactaagtcagtccagggtcattgcagaacggtcttgcagttatctcatcccccttagcaaagctagcatacttcatatgcccaccaacttcccctgaactggaggcagaggtttatcttttcagattgatgaagcaccttgacttacacaatctcaatgcagattatgaagccatagtgagagtacatttcactgggccatgaaaagctagtaccactggtaggaggataaaactccccaagcagtgactaagatgttaagaggtgaaagggggatcttttgatgtcctattgtctgcagccagtgagcctgctttatgatcacccctacttgtatttctaggatatctgaggtgtttatccaggtacagcagccagtgttgggtgttggtaattgcatggaaagtccatttgtttccatgagagtgtgcccattgttatgttgattgggcagtgaggctgtttcttggtcagagtgaagtctcatggaatatccaaaaacatgacataaattcctctcaagggtggccatggtagccccagcatctaatagagtgacatatatttagctgtccaggaagcaagctattgccatagtccttttctccactcatgagatcctttaatagttcagtcactcagttgctattttcctgaccagacagctgggctgttggcaatggcccatgatttagtggaaatggagcaaaatatagtgttgggggcagcctgcatggctactatcatttcatgtagtttgtcccattgggcagaatgaccatgttcagtgtcagtcaaaagatgccatcccctggctggatggtggctgcacccagtggatccactggcatgtgttttgtacaatcatcagggccccatgccatactgacacaggcatgtctctgaatctttggctctatgtggccaaaggagaagctaaattgtcccctatgggccatttgttcccttctagcaagcttgccatttattcatggggcacatgggtcctgtgggatcctggttagggctgattctgactgtatcatttccacttaatgatttggatctgttgggcctgtccagttttattgattgtgtttgtaggtaccaaagtgagaatggttagttaaggtcgcagcgtcctgcctggtgctctagctctgagatactcagcccctatcagtttcctacagcaagcaaggagctgccattcaaaagaggcacaactgttggctgcttcaggaaattttgtgtccaaaatctgagtctggtgcacccagtgacagtagaatcacctgacatcagatgttagtctgagccctgatgtgtgatacaatgtgaagggttcaggaggggtcattcttcttggcaaattaggtgttcagaagagccagtagcactctaaatctcggttgggggaaactcaaattattgagtccccacagagacctccataacattggttcatgagactcccagggaaagctgggaaagatgactgactgaagtccatgtgttgaatcattctcattattaaaagcccctgctcattaatggcatttcgattagcatccacttggaaagcatttttttttttggattatggctcattttaaaaacatctagtcatagctcttccacaatgactttgtctgtaatcatcctgttgcatttcttttaaggcctgatgatctgtcaaaaccaacagccaatattattaaaatgttattctctttgcaatgtgatcatcagacataggccttgcagtttacccactgttttgatttttacatttccagggcttccttgacaatggcactgatgtgactccatccagcatccattgttgtgagaactctatttggcatatcatcattgtgggcatgaacataatggagactttcataggatgcaatgattaatattcaacattagtcaaaatttcttctagtcctacccttggagctctactgggttggaaaatattttcggacaaggacaatcatttggtagagttttaaaaataaaggctacaaataaattttccatagcaagagtatgaactatgtgtggtccagaatacaattttttatggaatgtaacaaaaattatttaaatgtattcaatttagataataattttacaaataggcatatattgcatatataatagaattaacacacttaagtatgagtactatatatatagccaacattttatcaaataatatattgacttgtatgtatcttacatacatgtatgcacattttcccataaatatggtaaattttaattttttattgaaatattagttttaattttgtcattaattttctaagtttataatttgattactaaatatttacatttatgccactaatttaagaaaaaatacatgtgtgtatatataggtagaggtgtaaatactgtatcaggaagcttttatgcattaatgattggtaactggctaaatacacaactcagtgacagaaaatagtaaacatttgttttcatgttcatagatgctcacgttcacagtaatctggctgatcaaggaagggttcaggtgagtggtttctctgcatggcactgagctcgtcttcagcctacacatatcaactgtctgaggacaaggctgaacagcagtgactacccatgactcaagattcttctggcaggtcacaagagtgaacagcatcccaaaccaaactgcacagttgagtttaagtccaataatttctaacatagcttcacacatttcaaatatattgctttatttcagtgagtacaaatttttaagaaaatgtttactccatttaattatagaggtgtttgatcattccatggacaaataattatgttttcaacctttacaatattgaaaatatttgcaaatgtaaatttgcattaataagaaaataaagctggatgcgttttcaacatgtggctttaaatataatttatttaaatggcctcatgggggaaaatcattttaacttacataaattctcattttgtctctcttgtttcttatagagttgcccaataagaagtcctcccatgagatttggaagtccgaaaaggatgactcaatattctccattggtacctaagacagacacagggacagacatgaggactagagaaacacctgaaaagatgctgtaggaagctgagagcatcagcacccccacccctaagcttccagacaggactgaggaccatatggttagaaagcccatacttcagaggaagatgcattctgttgcctgagggaggatcagagattcctgcttctaatatcagctttcatgactactatatccttggctttgaaaggttgtagtgggaaacttaatcttaggaatttggtcattcttgtcatacccaacagagcaaagaaaccagtggggaaaggcactcagggtgcaaaatattgtttctagaatgcaattgaaataggccctattatcccatggaactaatgtttatgtttttttgtataaacatagaaattgactcccccagtcttaaaactcaagatagttacatctgtcttatctgagtttttttttgtttgtttgttttttcagtaaaccaatgaacaggcctcccagatactatcaaggagctgaaacttacatatcactgaatcgggacagtgagacatcagaaccttcacccattatgattgcctcactgacctcctgcttcctgttgaccaaattatcttccttacccctccctaattcctgttttcccacatttcttccctgctatataaactcctaatttcagttggtcagggagatacatttgagaatggtatcacatctcctaggctgcagcacctgattaaagcctgttccttggcaatgcttgttgtcttagtgattggctttctgtggggtaagctgcagagtcttcactgaatccctggcatttcagtaacaaaattctctgcaaccttcactgctttggcttattgtaacctgaaatcaaatttgtccacaacttctgagataacttgatataattctaggattcattttgtccaccactgcttaccagtctgagcttgccagctcccaacccttcctagtgccaatgaactttctcaaagagccacaggtaacattttccctttttcataaaatgctaattttctcttcgttcttccaatatcttgaagaccactgagttttcctgtatgccccacctggcaaatatttctttgcaaataaaacttaaatttagagattcatctctacattttattttgactttagtagtttactttaattctctgtattaagacaattcctgcttagaatatctatagtggcttcttctgtgttatatgaattcaagctgaagccataaactagactcctcaagtgtcatgatctctgtatttatcaaatcaggagatgcattgctatgtctgtgcagttggggctgagaaagagaaaagaattagggtgcagaggcgatttcacgtacccctctaccaacaccatcagagtgtggctgcatctgagcaacactctcagccaatggaggcatcaggaggagcagctggggcagcccagcttcacacatctgcttccctgggggtttatgttcgggttggtaacactgtgggagggaaactgttagcctgttgacaatagtaagttgcaaaatcttcaggctgcaggctgctgatggtgagagtgaaatctgtcccagatccactgccgctgaaccttgatgggaccccactttgcaaactggatgcagcatagatcaggagcttaggggctttccctggtttctgctgataccaggctaaccagctgctaataccctgactcgcccgacaagtgatggtgactctgtctcctacagatgcagacacggaagatggagactgggtcatctggatgtcgcatctggaacctgagattggaaacataaaaacaaatgtccacacaattaatcatgctgtaagagaagttccctgaatagtaaagcagtactcagcacactgaccgagtataatcctagtgttctcctttcttacctgggaaccagagcagcaggagccccaggagctgagcggggaccctcatgtccatgctgtgtcctgactgggtctgactcctgcacagggtgtgatcagcctgttaataagtcttcaggtcaggagactgtgctctgggaacatgcaaatgagcaggggatggggcaggctgggcgcagctgcagggctggctcatctcagtaactcagcaccagctcagtgtccccaggtgtcccaggtaagaccagggtagcacaaatttgtctgcagagaatgtgtttctactgggaactattttgttgtgagtaacattttttggtttctttttgacgatttgaaatattcctcaggagttgatggactaatgtatttcattggtgtatggggattatttaggagaatattgttgtttgtaggaaacacatagtaaaatgttagacggtacaattctcaagtcttcaaaagactcttatatgattccggctagggaagggggtatttgtcgtatacatgcaacatttctgtgagtttaacattgttcctatgtaaaaaaattaaaaataaaatttattgacatgatggtacatacatttgtaagtatcaggtaatggtgttatgccattgttcttaccagtatgagatcaaactatgtactatagatacacaaagatgataccgtgttttctcgatgcatgcagcagtcacagatccacaattatcaagagcgacaggtctctatagtactcagacactaaatgggttgcaccttattcttgttttgggcaccttcatagtctaccttcttttctgccattcagtattatttcccaaagttcatctctcttactgagggtgaccactgcatggagcatgtccctgccatgcaccatcaatgacactttcctcttttactttttatcagtgattggggaaatcatcctgacccaggcaacagcctccctgttaactgctttaggaaagagacactgaatctcttatcaagcagttgcctatgtacatggagaaatcacttggatccagatgaaactggacagggatttgcactcgttatatctcatatctctaatgtgcccaaaaatgtcccagcctgactcagtagcagggaaagtggatccaactacatcagcatcagtgggctgccacctaggactccacaaaattttactgatgcctgactaggggagccaaatcacagtgctgcaggctgtgcacaaaccttcctgctgttttttaagctgcctgaattttaagggaacttgcttatattgggagaaaggaagaaagctccatttgtcctctaaatatttgctgaaaatgaatggacaaaagaaagattaataagagaaaagacaaacaaaattcatttgaagtgcagcagaatatcatagcagggtgattacccagataactcaatgggatacagttgtttatatttcttttctaaggaagagggaattgagaagtgtaggcaacctggaaagaatagatgagaacagaagtgcatcctcaaaagaacaggtcatagcctgtctggataaagcatcaacttcagtctcttgtattttagattcctcttttgtgttaatattccctgatgtaaaaattctcaggaagaatttttttgacaattggtttccttctggagaatctgctattatgcagataagggacatttaggaaaagtctttttgtgcatttggtgctttctaaatgtctttggttttacataatcatcataccagtgcagcgtagtttgagatgttattttctggattcctttacttgcaacccacctgccaagatcctgttccagagagatgcagctacagattgaatgagcagttgacccttgaacaacatggaggtttgggcactgaccatgggtgcagatgaaaacctgtgtagaacttttgcatttctaactccaggcatcatcttgaaagtggagaaagcagaccttaacctgcccatgtcttgatctttaatttcccattctccagaactgtaagaaaataaatttctgttccttatgaattacatagtgacaatgaatctgttatagcagcttgaaatagaacaagagagacagcgcacaatcagtgaggacacgatgaggtgtatacataccccagcttcctcatctctcaggtggaatagcccagaggaacttagtccatgtttccacatgtggttgatctttggttatcctgagtcaggtaggttgttgatgtgtctttttccattcatcttctgttctcttcctcactttcctcctttcctcccagtgtaaatttgctgcctaaacagggatcctcattgagggtggacccaaactaagatagttaaaaaaaaaaattgttaatcttttgtaagaggggtatttctcatctgaattctgataatttctttttctttgacatgtaggaatattcaggaggcacttaatttttttttttttttttaccaatctgttttacattcaatttgtgaactgattttgtttttctgtgtgttaaaaccaaaaattaagttgtaagccaccaacctgctgaatggactcctcttttgtaaagagcacttcaaagaaatttgaaaaactaggttaggccatgactggcaggtgggtttagatgtgcctcattatactttggagttcagacacaactgaccaacattgtcattacaacagagatctttgggctgacaaaacagacgctttgtagcattaagataccatattccaacatgacagataataggccctgaagaaaatctaaatattttaccttaaaaatatttcttcatcatattctgaagtggttctgcaaagctgccagttgtgggggaaatttgcattctatagagaatctcctccccttactaagtcttttttaaagtctgacattttttaaagctctgataagcaacattcaccttgtactttatctgctactgataggattcatctacatgacaagaaccttggcttccacatccccttttctacactcaagcatttctttatgatgaattcaactctttagacagaccttaactctttcaaccagtagccagtaaggaaagctttgaattcacctatgacctggaagcccctgcttcaagctatcccacctttccaggacaaactaatgtatatcttatatgtattgatttatgtctttccctgtatttctgtgtttccctaaagtgcttaaaaccaatgtgtaatccaaccgccttgggcacatgtttacaggaccttctaaggctgtgtcacaggccataagccttatctttggcagaataaccctgtaaattgattgagacctgtctcagatactgttttgtttatactgggtcacaaaatttaaaaatcctctaaaactatctacacatcaataaatctacattagagacagtggagtgagcataccccaacagataaaactcacaagttagaggaacctgagtctaagattttgtccacctcccttgattcataaaaatacttcgtgattttttaaattttactttagagaaggacaattttggggaatatgtttatggtcggtggaatgaataatgtcccaccccaaaggatgtccatgtcctcatctctggaacccaagtgttataggagtttttaagaaattattttaggcagataggaaaaggggtccttgggaaggttttgtttcctttaaagcagctctagaaacacttcttgtctagccagaaagccctggctcttagagccaggctgggaagctttcctatgcaaatcatagccattagaaactggattcacccaaacatggtgattcccaccgttttcttccttgtcaacacatgtgcctgggaaaaacctgaaagatgctataggaagctgagagcagctgcaaccccacccttaagctttcagacaggactgaggaccacatggttagatagcccatacttcagtggcagatgcattctattttctgagggagtaccagagaatcctgcttctactgtcaacctgcctgactactatatccttggctttgaaaggttgtagtgtaaaagttaatcataggaattcggtcattcttgacatacccaacagagccaagaaaccaggagggaaaaccactcagggtgcaaaatattgtctgaagaatgcaattgaaatagaccctattatcccatggaactaatgtttatgattttttgaataaacatagaaactgactcccccagtcttaaaactcaaggtagttacatttgttaatctgagttcttttttcaggaaaccaaccatcaggcctctagatactatcaaggagctgaaagttatatatcactgaatggggacagtgagacatcagacccttcacccattatgattgcctaactgacctccagcttcctgttgactaaattatcttccttacccctctctaattcctgttttccacatttcttccctgctatataaacgcctaatttattttgtcagggagatacatttgagaatggtgtcccgtctcctcggctgcagcacctgattaaagcctgttctttgacaacacttgttgtcttagtgattggctttctgtgtggtgagccgcaggatctatactgaatccctggcatttcagtaacaaaattctctgcaagcttcactgctttggcttattgtaacctgaaagcaaatttacccacaacttctgagataacttaatataattctaggattcagtttgaccaccactgcttaccagtctgagcttgccagctcccaacccttactacagccaacaaaatttctcaaagaacaataggtaataatttcccttttaataaaactctttgctcttccaacatattgaagaccattgagttttcctgtatgccccatttggcaaaaatttcttagcaaataaaacattaaatttatctgtacattttatttagacttcaatactttagactctaattctatctattaagactattcctgcttagaatatctataatggcttcttctctgttatatgaattctaaccaaagccataaactagactcttcaggtgtcatgatctctatctttattaaatcagcagaggcattgtaatgtctgtgcagctggggctgagaaaagaaaaagaaattgggatgcagaggtgatctcatatcctcctctaccaacaccatcagagtgtggctgcatctgaggaacactctcagccaatggaggcatcaggagaagcagctggggcggcccagtctcacacatctgcttccctgggggtttatgttcgggtttgtaacactatgtgagggtaattattaaactgttgacagtaataagttgcaaaatcttcaggctgcaggctgctgatggtgagagtgaaatctgtcccagatccactgccgctgaaccttgatgggaccccactttccaaactggaggcatcatagatcaggagcttaggagctttccctggtttctgctgatatcaggctaaagcactgctaatgccctgacttgcccggcaagtgatggtgactctgtctcctacagatgcagacagggaggatggagactgggtcaactggatggcacatctggcacctgagattggaagcataaacacaaatggtccacacaattaatcatgtagtaagagaatttccctgaatagccaggctgtactgagccccctgggctgagtaaactgctagtgttctccttccttacctgggagccagagcagcagaagccccaggagctgagcggggaccctcatgtccatgctgtgtcctgagtgggtctgactcctgcaagaagtgtgaccagcctattaagaagtcttcagggcaggaggttgtgttctgggaatatgcaaatgagcagaggatgggcaggctgggcacagctgcagggctggctcatctcagtaactcagcaccagttcagtgtccccaggtgtcccaggtaagaccagggtagcacaaatttgtctccagagaatgtgtttctactgggaactattttattatgagagacattttttaggttttttttgacaatttgaaatattcctcaggagttgatggagtaatgtatttcattggtgtatggggattatttaggagaatattcttgtttgtaggaaatatataataaaatgttagacggtatgattatcaggtctccaaaagactctcatatgatcccggttagggaaggggttactttgccctatacttggaacatttctgtgattttaacattgttcctttctaaaaaaaatcaaaaataaaatttattgacatgatgctatatatacatgtcagtattcggtaatggtgttatgccattgttcttaccactataagatcaagcaatttactacagatccacagagatgatgcctatgtacatggagaaagcagtttgatccagacaaaactggaaatgatttgcaatcattatatcgcacatatctaatgtgcccaaaactgtcccagcctagctcagtagcaggggaagtggatccaactatattagcatcagtgggctgcagcctagggctccacaaaattttactgatgcctgagtaggggagccaaatcacagtgccatagcccgtgcacaaaccttcttgctgctttgtaagccgcctgaattttaagggaacttgcttatattgggagaaaggaagaaaactccatttgtcctctaaatgtttgctgaaaataaactgacaaaaggaagattaataagagaaaaggcaaacaaaattcatttaaagtgcagcaggatatcatagcagggtgattacccaaataactcaataagatccagtagttcatatttcctttccagcgaagacggaattcggaagtgtaggcaatctggagagaatagatgagaacagaagtgcatcttcaaaagaacaggtaatagcctgtctggataaagcatcagttcccagtctcttctatttttgattcctgttttgtgttaatcttccctgatataaaaattctcaggaagaagttttttgacaattggtttccttctggagaatctgctttttggcagataagcgatgtttaggagaaggctttttgtgcatttgctgctttctaaatgcctttggttttatgtaatcctcatacgaatgcagcatagtttgagatgttattttctggattcctttacttacaactcacctaccaagatcctgttccagagagatgcagctacagactgaaagagcagttgacccctgaacaatgtggaggttggggcactgaccacaggtgcagatgaaaacctgtgtagaacttttgcatttctaacttaagtactaatagcttacttttgactgctagccttaatgataaaataaatagttgattaacacttttttaagttatttatatcatatactctattattccaataaactatgctaaagaaaaaaatgtaattaagtaaattataaaaatgagaaaatatatttactacttattaagtacttgcttacaggtgacacacacagaagaaaatacaagtggatctgcaaatttcaaacccaatttattcaagggttaactgtaccaggatgaatataggagtctctatctgtattctagggctttctctttgctgtacctctgctcacttccaatggcaatatacatgtcttatgttctttacagtcttgggcagagaactctgcctgcatgcattgctgaccaaatgacctggaatgtgtatctcttaggaaagtgctatggtttcactgtgtcctccagaatccatctgttgtaaagttaattctcagtgtaatggtattgccaattggggcctattgggatgtgtttagatcatgagtgtggtgccctctagtggaatacattaatgccagtataaacagcaattgtggggctgggatctctctctcttctgcttgtctgtcatgttaagacatggccttccttcctttgaaggaccccaaactccaggcatcatcttgaaagcaaagaaagcagaccttaacctgcccatgccttgaacttaaatttcccattctccagaagtgtaagaaaataaatttgtgttctttatgaattactcagtgaaaaggaatctgttacagcagcttgaaatagaacaagagagacagctcacaatcagtgaggacaggatgaggtgtatacatacttcagcttcctcatctctcaggtggaacagcccggaggaatttagtccatgtttccacaggtggttgatcttcagttctcctgagtcaggtgggttgttgatgcgtcttttacaattcatcttctgttcccttcctcactttcctccttttctcccagcgtaaatttgctgcctaaacaggaatccttattgcaggtggacccaaactaagacagtaaaaaaaaaaaaaaaaaaaaaatcgttaatcttttgtatgaggggtatttctcatctgaattctaataatttctttttctttgacatgtaggaatattcaggaagcacttaatttttctttaccaatctatttcagattgaatttgtgcagtgattttgtttttctgtgtgttaaaaccaaaaattaagttgtaggtcaccaacctgctgaatggactcctcttttgacagaaagcacttcaaagaaatttggaaaactagattaggccatgactggcaggtttagatgtgcctcattatactctcctccctttggagttcagacacaactgaccagcattatcattacaacagagatctctggactgatgaaacagatactttttagcaataagataccatactccaatgtgacagataataggccctggagaaaataaaaatattttatcctaaaaatatttctttgacatattctgaagtggccctgcaaagctacctgttgtgggggaaaattgcattctatagagaatctcctccccttactaagtcttttccaaagagtctgacatttttttctaaggtctgataatcaacattcaccatctactttatttactacccataggattcatctacatgacaagaaccccccattttctagactcaagcatttctttatgatgaattcaactctttaggcagagcttaactctttcaaccagttgccaatcaggaaagctttgaatccacctatgacctggaaacccctgcttcaagctatcccacctttccaggacaaacttatgtgtatcttatatgtactgatttatgtctttgcctgtaatttctgtgtctcctaaagtgtataaaaccaacgtaaaatccaaccaccttaggcatatgtttgcaggacctcctaaggctgtgtcacaggccataagccatatatttggcaaaataacctgtaaattgattgagacctgcctcagatagtgttttgcttacactaggtcacaaaattttaaaatgcctaaaccgcagcagcccggcattcctccaggacctcctcccccgggatcttgcttcaagtgctggaaatctggccactggaccgaggaatgcccacagcctgggattcctcctaagccgtgtcccatctgtgcaggaccccactggaaattggactgtccaactctcctggcagccactcccagagccactggaactctggcccaaggctctctgactgactccttcccagatcttctcagcttagctgctgaagactgatgctgcccaatcgccttggaagcctcctggaccatcacagacactttgggtaactcttacagtggagagtaagtccatccccttcttaatcaatgtggagtctacccactccacattaccttcttttcaacgacctgtttcccttgccgccataactgttgtgggtattgacggccaggcttctaaatctcttaaaactccccaactctgttgcgaacttggacaacattcttttatgcactcctttttagttatccttacctgcccagtttccttattaggtcgagacgttttaacaaaactatccacttccctgactattcctgggctacagccacacctcattgccacccttttcctcacttcaaagcctcctttgcatcctcccctgtgtctccctgccttaatccacaagtatgggatacctctactccttccttggcaactgatcatgcaccccttaccatcccgttaaaacctaatcactgttaccactagagcctgttatcacccacctgttacaacatggcctcttaaagcctacaaattctccttactgagggaagagagagaccctctcatattgttttatattgttttatactcagtacctgttttaagagtaaaaatcaaggaagtgaaatcagagacaggcagcccggcgccaggcctgggcctgcctggcctaaacctagtagttaaaaatcatctcatgacttagcaaccaatgttatccatagattccaagcattgtatgaagaacattgtgaaactccctgttctgttctgtttgactctgactaccagtgcatgaagaccctgttacataacccctagattgctcaatcaatcacgaccctttcatgtaaaatctttagtgttgtgagcccttaaaatggacagaaattgtgcactcaaggagctccgattttaagacagtagcttgccgatgctcccagctgaataaagcccttccttctacaactcggtgtctgagaggttttgtccatggctcatcctgctacattacaactcccctatcctacccatccaggaaccagacaaatcttacaggttggttcaggatctttgccttattaatcaaatcgtctttcccatccaccttatagtgccaaacctctacaccctcctatcttcaatacccccttccacaactcactattttgttattgacctcaaagtcaccttctttactatccccttgtatccctcctctcagcctctttttgcctttacttggactgaccgtgacacccaccaatcccaacaactcacctggactgttctgccccaaggcttcaggaacagcccacactactttggccaggccctttctcatgatctgctttcttttcacctgtctgcctcccaccttattcaatattttgatgatcttcttctttgcagtccctcttaccaatcttcccagcaggacactaccctgcttcttcaacatctctatttaaaggggtaccgagtatccccctccaaggcacaaatttcttcccctagtgttacctatctcggtataatcctccatcagcatacacatgcccttcctgcagactgtgctcagttaatctcccagacccgaatccccaccacaaaacaacaactcctttccttcttaggcattgttggatatttccgactctggataccaggctttgctatcctaacaaaaccactttacaagctcacaaaaggtaacttaactgatcccatagaccctaagttttttgcccattgttctttttgctctctcaaaaaggccctggagacagctcccacactagcactccccaactcgtcccatgctttttccttacacacagctgaaatacaaggctgcgctgctggagtcctcacacaggagccaggcccatgacctgttgcctttctatcaaaacaacttgacctcacaattctggtgcagccctcatatttgcgtgcagcagcagctgctgctgtaatacttctggaagccctcaaaatcacaagctatgctccacttaccctctacagttctcacaaccttcaagcattaatatcctcctcacacctttcacacttactgtctgcccctcgactcctccagctctattcatcttttattgaaaccccaacagtaactattggccatgggcacgatttcaacccagcttctcagttagtaaccaacacaagtcctgaaccacgtgactgcatttccctaatacacataggatcttcctcctttcctcgtatttctattcttcgaattcaaaatccagaccacccaatcaattttcaccaggtaagctggatatgctgtcatgtcccacatctctattattgaaactgctgcacttcctccctccaccacttcccaacaagccaaactgattgctttaactcatgtgctctctctcgctaagggaatgcacattaacatttatactgactccaaatatgctttccacatcttccataaccatgctgccatctgggctaaaagaggcttccttaccacacaaacctcttccattatctatgcctccctaataaaggtcctccttaaggctgctctcctgctggccaagcctggagtcattcattgtaaaggacaccagaaacctactcatcttattgcaaaaggaaatgcctatgccgacaggacagcaaaagaaatagccaatgcctccacacccgctaatattccagctcccactccagaggaccagtatttttcttccttatctatcactaccacctactcttttgaaagcctgctctactagtcttttccaactcagggaaagtgcttcttaaatcatggaaaattcattcttcctgcctcacaagctcagtccatgctttctttccttcatgaccacttccatgtgggatacaagcctctggctcgcctcctgcagcccctcatctccttctcttcatggaaatccatccttaagacagtcacctctcaatgctcgtctaccatgccaccagcccccaaggctttctcagccctcctccttttcctacgcatcaggctcatggatttactccaacacaagattggcagattgacttcactcatatgccccatatctgtaaatttaaatatctcctggtttggattgacaccttcactgggtgggttgaggcatttcccactatctctgaaaaggctactgcagtcatttcttcccttctaacagacataattccctgatttggcctccctacttctattcaatctgacaatggtttggcttttattagtcaaatcctccaagctgtctctcaagctcttgatattcagtggaaacttcataccccctaccatcctcagtcttcaggaaaggtagaaaggagtaatggtcttttaaaaacacacctcaccaagctcagcttccaacttaaaagggactggacagtatttctaccacttgcccttctcagaagtagagcctgacttcaagatgctacagggtacagtccatttcaacttttatatggacttactttcttgcttggccccaaccttgttccagacaccagccctctggacaactatcttccagtcctccagcaggctagacaggaaattcgcccgactgctaatcttctctttcctactccagattcccagccatatgaagacaccctagctgaatgatcagttcttgttaagagtctgagccctcaaactctacagcctcgatggactggaccctacctagtcatctatagcaccccaactgctgtccatctgcaggaccctccccattgggttcaccattccagaataaagctgtgtccattggacagcaagcctgatctctcctcttcctcctggaagttgcaagtactctccactacttcccttaaactcactcacatttctgaaaacagtaataacccttatgaacctaatatgttccttcattctattaggtctattcatccttactctactttttgcaacagggctttacacagtcacccccactacttggactgtgccccaaaacttgtcatccctactatcttctgtctagtcatactcctattcaccattctcaactactcataaatgccctgctcttgtttatactgctggtttacactgtttctccaaaccatcacagctgatatctcctggccctattgccaaaccaccactcttgacttcctcttggagtggatagatgatctttgctggcagggcacactccaatattttcaccatgatgaagtcctattctttatttttatactcactcttattctcattcccattcttatgccaccctctccctctccccaactatctccactacactatcagtctcactcactctctccaagccatttctaatccctccttagcgaacaattgctggctttgcatttccctttcttcctgcgcttacaaagctgtccctgccttacatacctactgggcaacatctcctgtctccgtacatctccgaacttcctttaacagccctcacctttaccctcctgaagaacttctttactttctagacaggtccagcaagacctccccagacatttcacatcagaaagctgctgcccttcttcgcacttacttaaaaaacctttctccttatatcaactctactccccccatatttagacccctcacaacacaagctgctattcctgtggctgctcctttatgtatctctcggcaaagacccactggaattcccctgggtaaccttgcatcttctcgatgttccttcactcttgatctccaaagcccagctacacataccactgaaacaattgtggctttccagctccatattacagataagccctctatcagtactgacaaacttaaaaacattagcagttattattgcttaggaagacattaccctgtatttcactccatcctttgctgccttccccttgctcttcagactctcctcccaggccctcttcttgtttgcttatacccagccccgtaaataacagtgaaaggttgctcatagacactcgacactttctcttacaccatgaaaatcgaaccttcccctctatgcggttaccccatcagtccccattacaacctctgatggctgccgcgctagctggatccctaggagtctgggtacaatacacctcttttagtactccttctcatcttttcactttgcagctccggtattgccttgcacaaggtctcttcttcctctgtggattctctacctacatgtgtctatctgctaattggacaggcacatgcacactagttttcctaagtccctagattcaatttgcaaatgggaccaaacagcttcctgttcccctcatgaaaccgacacgataaaaaagtgttattccactaattcccttacttgtcagtttaggaatttctgcctccactattgctctcggaactggaatagcaggcatttcaacctctgtcacaaccttccttagcctttctaatgacttctctgctagcatcacagacatatcacaaactttatcagtcgtccaggcccaggttgaatctttagctgtggttgtcctccaaaactgccaaggcctcgacttactgctgaaaaaggaggactctgtgtatttttaaatgaagagtattgtttttacctaaatcaatctggcctggtatatgacaacataaaaaaactcaaggatagagcccaaaaactcaccaaccaagcaaataattatgctgaacctccttgggcactctctaattggatgtcctgggtcctcccaattcttagtcctttaatacctgtttttctccttctcttattcagaccttgtgtcttccgtttagtttctcaattcatacaaaaccgcatccagaccatcaccaatcattctatatggcaaatgctccttataacaaccccacaataccaccctttacccgaaaatctttcttcagtttaatatcttctacactatgttcccatgccacccctaatcccactcgaagcagccctgagaaacaatgcccattctctctccataccaccaccaaaaatttttgccaccccaacacttcaccagtattttgttttttcttattaatataagaagataggaatgtcaggtctctgagcccaagttaagccatcatatcccctgtgacctgcatgtatgcatccagatgacctgaagcaactgaagaacaacaaaagaagtgaaaatagccagttcctgccttaaccgatgatattccaccattgtgatttgttcctgccccaccctaactgatcaattaaccttgtgacattccttctcctggaaaatgaatctcaggagctcccccacaaagcaccttgtgacccctgaccctgcccacaagagaacaaccccctttaactgtaattttccactaccctacccaaatcctataaaactgccccaccactatctccctttgctgactccttattcggactcagtcagcctgcacacaggtgattaaaaagctttattgttcacacaaagcctgcttggttgtctcttcacacacacatgtgtgacagattacagccctactgacaccttaacattagctcagtgagacttctgacacggggtactatattttatttgtgtgaagccaataagactgtggtgatttaaacagcagcattggaaactaatgcaaggggaagagatgtctttcacctcactgagagcatggttgtcctctgttcttggaaatatttccaccttgttatctggtgtcaattatgacatattttctagtatttaaagaaaagatctgctgccctaaaatcctatgtccagtaaaattattatttagaaatgaaggacaaattgagaagtcctcagttgtagaaaaactaagagtatttgctgccagcagatccactttaaacataggcaaaatgagccctaggaagataaaactaaagataaagagaggatgttaaataatgttagggacaaaaggctacaaaaatgagaagatagatggatataatgcattgctaaatcatgtgtgatagttgtatcaaagttgtaatactgttttgttcctaatatatgcagataaattacttttaaaaaacaatctatttacaatgggggaggaaacatgacataaaaaaggtaaaattctatatttattttaaatggtaatatattgatgccaacatactgtgagaagctatgcatataaaggaaataccatgacaaccaatttgaaaatcattataaaaagagataccccaaaattaggtaaaattaaaatgaaattgtgaagatgttcaagtaacccaaaagaaggcagcaaaaagaaaacagagaagcaaaaaaagatatagcaaaaaagtagagtgcagacttaaattttaatatatcaatatcaatatattaaatatgcaaattatgaaactttgaaaaagacaacaattgatgaataaaaagaaatgtcccaactgtatgttatctacaagacactcacatcaaatataacagtataagtagattgaatataaaaggaaggaaaatggtatactatgcaaacattaataaaaagaatcagtagcaaatactaatatcagataaagtagactacagagccaaagaatgttaccaggggcagaaaggtacattacataatgaagaaagtcattttggaaagaagacagagcagttctaagtgcgtagacaccaagcaacagagcgatatagtgcatgtggcagaaactaacaaaacaattgcacacagagacttcaaaaacccctttttaatcttcgataggacaactggacagaaaatcagcaaggatttaggactcaacaatatcatcaacccacgagatctaactgacatttatagaacactccaacccataacaatagaagttcacatttttttcttccaagtgcccacaacatataccaagataggacatatcctgcccacataacctctcaacatatttgcaataattaaaatcacagtgaatgtgttctctgaccatggagggatcaaactagaaatcaatattgaaaatgtaacccccaaattttcaaatatatgggaactatacaatattgttctttccaaagaaccagcctttggcttgcctggtgttcagtgtcactttttctgtttgcagttttattgatttctgccctaatatttattatttattttgctcatgttctacttcagatataaattgctcctctttatgtagtttcataaggtggaagctgagattattggttttatcccttttattttctgaaaaatactcatatgcatatgtttatctacgtgcatacacatgcataaatatgtgcagatgcatatgcatacacgtggttttaataccataaattaccctgtaagtgctgctgaatacctatgcgtattttcttttctctgagctcaaactccactcacttgcaaacctgcccacttaatctgcatgttcattggtgtctcaatctagaattgagcaaaaataacaaactcctttcattttatctcaactttcttgaccgctaatacatttaacatcagtaagtcagaatctatctaatagattaaggccaaagctgccaggtcactcctaatctgactcttctcacaccaaggagtgtaaatgacattgatttaaaaatatggtatcatctgcctatgtctccaacaatcttcactgccccaaaactagtttatgccaggatccactttgcccagataagcatctcttctgcttctcacagcccaattcgagtcattactttgctaaaaaataaatatgaccatgggggtactttggttaaaaaaattcccagaatgtcctgctgtacttacaaagcatttgctccccaaacagaaaatgaaggccttattaatttcacatcagtcacatgtggtgatctttaagacactgagagaaaatggctctgacctgccccctcacgaactttctcttttttacctcggttggttaagtcactctcctcatagtgcctttctctgtccttcacacgttcatactgtattccttctaagcgccttgattgtcatgaacctcagtgcccttcagaaacttctcttcaggtcagttgttctcctcatccaggtcagtcacctcctcagaaaaagtagcctctacctccctaactaactgactccttttcctcattaaccacttcctcttcccttgccatttttttcctttatgacccttaactttttctagaatctttttgttgatttatgtttaattagacatggcctttttttcaccagaaaagatataggtaaatgagagtcagacactgactttctcaggggtgcagcctagatacgttcctggtccagcatagttgctcaattaacactttattgaatgaatgaataatgaaaagttagtaagaaactctccaagacataatcaacactcataacctatacacgttgaaaacaacccactgaatgtaaaacatggattattctgagtaatgagaagtttgaatagcagtgtgctgctcttcatagtcagctcttcatagtcagtgtgctgctcttcatagtttgtattttgctggggagataaggaagacatccaaagtccatgataatcaggtaagagtattcttatcttttttaaaaaacaagcaaatagactttgcagtcacaaaaaaattgcaataaatgggactacactatcacttaactctattggctcctgttcacaaaaacaggttgtattattaactcttctttgaaaacaaaccagctccaaacaaaatgccataaaatgagtatgtgcagtcctccctcagtatccatgggaaatagtttccagggcaccctgcagatattccaatttttggagactcaaaacctttatgtaaaatgcacaatatttgcatataacctacacatatcctcccgtacatttcacaccatctctagcctccttatagtacctagtacgatgtctacacatgacttaacttgtgtagattcatccaagtgttactcagcacatggcaaagtcaagctttgctttttggaattttgtggatttttttttcaaaatatttttgatccaggattagttgaatccatggatgcagttcccatggatagagagctgactgtacagctccttataattctgagggtcagctctgtggttcttccattctgggctggctggactgatctctgctgagtccgctcttgtgtctgcagttaccctgtggttcatttgcgactggatggtctgatgtgacttctttaacctatctggaagctggtttgatgtgcaggttggacaacttttggtatcggtttacatgggtcaggaagatgggtcctattccccaatctgtattaggtttgttcccagatcaactctggggttcaagtctattcattgtgggttgtttgggagaaattctacatgaacaaagctgaactgctgtcatttattgctgttagcagttattgttatcctctgaaatgcatcttatataaccaagatctccccagggtggcccaacagtacagctcagctcagcccatcctgtcacttcgctggatgactgcaggtgtgagaaaggcaatatgctcagtcacaggaaaggcaggggcccaccctggggctgaaacctgcagacacagcgttcacacagcttctttgcaaaatacgaagacttcattttctttatacttaagatagttatacatttttttctataatgtccctatgctatttaactatttttaattttcagaactggttgtatttattatttctgtgttaggtgctcttagtcacttatggcaagagtgagttaatagagacaacatacagagtagccatggaacaatagagaagtgtgtgtattcagacaggataaagatcaaaggggtgacaaatacattcttttgagaagcagattctcatagatcaccacaagtcaaggtccacattcaaggtgcagtggcgtgtcagtcacattgtgcaaatggtcagctctgcacattaaacttggctagcacattgcaggaccaaaattacctgtaaaggtatggggaaaataaaccatcatggaaataacaatttgaaggagttctcaattatttatacttggatataaagcagaacgctacaatgaatgaacctacaacctaaaacctttaagccttttaaagaggtttctttttgtcagggtatttctcagcaaataatgataaaaaatttatggataaactacttgcacaattagccacaataaatcccttccctgtactcatcctttggttggcctcattctaaatggatgcaggtgttgcccatgtgtcttgctcaggccaataggataatagcagatgtgacacaagtggagtcttggaaagggcttgcacatcgaagctttcctctctctcacagtgcttggaaaccctaaggtcacaatgagaataagcctgtgcccatctacagtcaatgtcagtggcatggctgctcttcggtctactatttgttcttaaaatgtgtgctaagtttgttatggccatgtaacaaattaccacaaatttatcagcttaagactacacccatttatcatctctcaatttctgagtcagcagttggcacatggctttgtcgggtcctggccattggatttcacaagactgtgccacagtgtagattgggcttcattctcacctgtgagtcccctgagaacatagatactttagagctctttcaggtagttgcagagctcattccttagcatttctatgactcagggcttcaatttctaactggctcttggctcaaggctgctcttaggtccaagaggctgtggacaattccctgccatgtgatgctcacacaggcaatgcccacatggctggttgcttgttcatggtcagcagaaggtttcagagagtgtctctttccagtctgctatgacagaggcttatagaatacaatcattggaaagacatctcataacctatgacatatcatatggattagaagcaagtctaggttccgcttgctctctgtggaggtagattatacaattgtgtgattcactggggagagggttctgctagggtgttctggcatctttagtttcctcaaatatcaggtacttgtactgagtgtgaaatctgtcctgtacttactggcattgactagtcctgtgacccctgggaacatcttgggaagcatactttgtaagagaggttttagggtaacctagctattggaagcataacatttgcaaaatatcctaatctttgtgatttctaacatgtcctcaaggttccttaattgcaattatcataagccaattatctctaaatatccgcaaaatttatatttaatagtaggaaaatgatttattaaggagtctattaaacaagactcagggaaatgatgtcaacacccaattgctgctgcccactgctagactatgtgagacaattttcatgaacaatagaacagatactgcatgctagacacttctgtgagcaccactggcctgctacctctagaaatgtttgcagaacaagggcaattgctatgagtctcaaaatatatatttttttattatactttaagttctagggtacaagtgcacaacgtgcaggcttgatacatagggatatatgtgccatgttggtttgctgcacccatcaactcatcatttacattaggtatttctcctaatgctatccctcccactgcccccgaccccatgacaggccccagtgtgtgatgttcctcaccctgtgtccaaatgttctcgttgttcaattcccacctatgagtgagaacatgaggtgtttggtttcttttccttgtgataggttactgagaatgatggtttccagctttatccatgtccctgcaaaggacatgaaatcatcctttttatggctgcatagtattccttggtgtatatgtgccacattttcttaatccattatatcattgatggacatttgggttggttccaagtcttgctattgtgaatagtggcatgataaacatatgtgtgcatagtaccatgatttataattctttgggtaggtacccagtaatgggattgctgggtcaagtggtatttccagttcttgatccttaaggaattgccacactgtcttccacaatggttgaactaatttacactcccaccaccagtgtaaaagctttcctatttttccacatcctcgccagcatctattgtttcctgacttcttaatgattgctattctaactgacgtgagatgatatctcactgtggttttgatttgcatttctcttatgaccagtgatgatgagcatttttcatgtgtctgttggctgcataaatgtcttcttttgagacgtgtctgttcacatcctttgcccaatttttgagggggttgtttggtttttttcttgtaaatttgtttgagttctttgtagattctggatattagccctttgtcagataggtagattggaaaaattttctcctattctgtagattacctgttcactctgatggtagtttcttttgtcatgcagaagctctttagtttaattagatcccatttgtctatgttggcttttgttgccattgctttggtgttttagtcatgaagtccttgcccatgcctacgtcctgaatggtattgcctaggtgttcttctagggtttttatggttttagatctaacatttaagtctttaatccattttgaattaaattttgtataaggtgtaagtaagggatccagtttcagctttctacatatggctagccagtttttccagcacgatttattaaatagggaatacttccccatttcttgtttttgtcaggtttgtcaaagatcagatggctgtagatgtgtggtgttaattctgaggcctctgttctgttccactggtttgaatctctgttttggtaccagtaccatgctgttttggttactgtagccttgtagtatagtttgaagtcaggtagtgtgatacctccagctttgtttttttttgcttaggattgtcttggcaatgcgggctcttttttgattccatatgaactttaaagtagttttttccaattctgtgaagaaagttattggtagcttgatggggatggcattgaatctataaattaccttgggcagtatggccattttcactatattgattcttcctatccatgagcacggaatgttcttctatgtgttttgtgtcctcttttacttcgttgagcagtggcttgtagttctccttgaagaggtccttcacctcccttgtaagttggattcctaggtattttattcactttgacttaatctgtgaagtgtatttaaattctcattctagagaagaaaaatccaaagtacttggaaaagagaaatcttgccatgagatacacagttcttcagtttcaaagcagagattatctctcagatattctggctcatacaattttcagtacactgcaagacagaagatgtgaagacaacactacccaattggccttacacttgctttgctcactgttaactaagttcactgtaaaaaaaaaaaaaaagattacaataaaacacattgtcaatgaactgtcacaaataaatacatctttagaaccacatccaaaatccagacatagaacatttctatagctccaaaacattttgacccactcttttggaatcaacttgctttctgcctcacagatcagggaattttgatctgcttcctgtcagtacagatttcattttccttgtaagagtttcacataaatgaaacataggatgcgctcttttgtgtctggtgacttttgtgcagcatgactctttctcagattcattcagatgtcctgtgttctaattatgtgctcctctttatttttgagtattatttaactgttcagtaattttatgatggatcccttcatctattgattgccgtgtgggttgtttccattttgggctattatggataaagttgctgtgaatgttcttgaacaagactttgcatgaacatatgtcttcatttcttttgggctaataccaaggcgtgtagttgctgtgtttatcagtaagtgtttaatactctgtccgactttaccgaaagtggctataatattttatatgtccaccaataacttattatagctccacaccctccaaaatatttcaattttttttttaagatttcacctaattgtcactcaacagtaaccagaatagctagtgattattaagctatgtttttcttcccattttcttgtcaatttggggaattgatgtgttacaggacattgagaacagaatcaatactgtcctagttccctatcaaacacttttatcaagccataatatttaggatggtaacatgatatataaagggagtgttggagtagtaataagtattttcaatacttattatattccataaagcaatatatcttcaatgaaatggcatttaactagacttagcatagtaaggttctcatctcaaccctagtattcagtattagcaaaagtttgaggaaaaaaaatatccagcaacataagccagagagtgttttgctagtcaagtagcactgcaatactgatgctcttctaatgccagcccttcacaataatttccactcagaacatttggttgcctccttgccttgttctccttatgggacttcatgctgagggcatgtggcatcacagagggagcagtgcacttgggtgcagaaatatagcttagtagattgtctggccttagaggtggctgcaatggaatacacattttcaaggaagttccctgttaaacctcctggtaaactgatagttaagaccaggtgcggggacttatccccgttatcctagatgtttgcaagatcaagtagggagggtagcagaaatctaggagttcaagaccagcttggaaaacacagggagactccctcatctctagaaaaaaaacactgtttgttaagatgtggtgtgaacaatggcatctctaagtgattatttattaacatttgctgagaaaattagaaaatagaacgatgccttctgatccaataatatcataataaagatgtgaagtttttaaactatggtaagtatagagaacataaaattgcccatcttagccattttcaagtgtacaggacaatggcattaagtatagtcacattgttgggctagcatcaataatatccatctccagaactctttccatcttctagaactgaaactccatagccattaaatgacaaccccctccccgtttcccctgctcccagtccctggcaacctgtaatcaagttctgtctctatgacagtgactgctgtgaagcaggtttgctgtgccctggttaccaacctgtcagagtccagggagacagaacaatcatacacaacaagttacaagaatctagtttagtatttacaggtgaccagcaaggcacggcagaagctgaggatttattgtgggtctttaccctgaggcacaggtaagtggggctgatggaatcttgactgtgtgtacccctcttggaccagagctaaggaaccccagaaagaagatgctctgggttttaaaccctggtgtcacaggacacatggagctaaagtactggaggacttaagtacaggaggacagtactagagggagctggatcagaagccagtctgttctgacctgtccctcgctatttcagaatgttacatttccagcacattctacaattattattgagaagtgtaagaaagagagtggggaaaatcaagtgagtccaggaccatcagaggactggagtgaagtcgtcccccaacacagacatcctccgtagaaagctattccattttatacgcctaccaaccaccgtgaactggaggcacaggtgtgtcttgtcagacggatgaagcaccttgactgacacaatctcaaagcaacatcattgagacagagccagaaaagatttcactgggccaatgaaaactactaccagaggcagaatgatcaggcccacctgaagcagttatgtagcccaggatcccatgatccacagaagaagttgctaaaggggtgaaagaagaatccttcaggtgggattttctgaatctgcagaatccattttctgcaattatgagcttgtttccagatctcctctacttgaatttctaggatacctgaggtgtttatccaggtatagcagggggtattggaaattgtatacattcctcccagttgggattttttaaaggtctagagcaacactgttatcttaaacatccatcccgatggagttaagggatgtctgctgggttaccaaggcagtggctatggaggaggagcaatatctgccatggtcagggacaagttccttatcatttcactttttttcatgagcactgactcctatacatagtaccaaaaatatcataaaagacataaacctatcatctgttgtaccttctggtaggtccctagtaagtctgaggtacagctttgggcttcaggctctatgatttacctaattccaaggagcaatatccagagacaaccccagcatgcccaacatgcaggatctcactattccacagatatccagagatggcatcacatatcctgcattttggtcactcccaaaccgcttacagagaaagatgtagcccttgggtgcatacagccccccttttcccatttttcttcaatcactctgtcatggttatgctggtattggtgcgttcattagccaagtctcactgatagtagagttgcatgagcaaagttttgctcatacaatattgtctgtagacagagggctagcattagtccagtccttgtttttatcattgccattgggatgtttctcatctatgcaatcaaaaaagtatggtgcatcaaaatattagtccaccaatgttttttttaattgtggtcatgacattcgccagaggcaattaagttaaacaggggtcctccagtttcctcccatgtggcaggtgtcagattctcactttgtgggccagtgcttgggtccttttgatgtacaccttagtattaggaatgttggtgtaatttacccttggtagaatgaaagggaacctctagttaatgacagaatgaggtcaagaatgggagattcactattttgaaagatcaccctggtgacctaaaagaagctaacaaagacattgtgcttctaggcctttgctgcctcattcttgtcaaaatgcagcctcacaggttaatgcatcgtctctcacccatcccagggtctcaggtgtcccctacccatctacaagggttgggccgtgttggtgtaggaatgcggtctggctgtccttgctctgtgaacaatccattgcctttgtcacttgatccagatatttcagtcctgattgtccactccaggaagggagattctgccctgtaaaaactggacatatttcataatatcaccaacactaaagggaggataagatgtccctggcaccagaagagggcccctagctccgtgatatttcttagtcttgttatccatcactgtgggatcttgtagaaaggaagcacccagaggaaacataatcctcctattagagttagggggcctgtctggggcattgtaatggcctagattgcaaaccaccccagagcatgtattctaaaggaaaaaaagaaaaggaatggttaggaacactgaaatagctttcacaggtccagactaatataagtgtctgcctggcctacctttacttccacccagctctgtgtttctcaacatgcactatttccctttttgtggcccaggatctttaatgtacatatttctctagtcagatgggataccaccccattaacagactttgtagatgtcctttctgcatattgctgtgtgattccactgatctagcattcactaggatcattggcctgtggatgcagggtgcatggaaagttcatcgtgttccatgagagtgtgcctattgtcacgttgcttgggcagtgaaagatgctcctttgtgagtgagaagtctcatggagtatccaaaaatatgacataaattgcactcaagggttacctaggtagtcccagcatcaaattcagcatcatatttctttttcctgcaggtggaaagctgtggccatagtcctttccttcacactggggattctttaatagtccagtctctcagttgccattttcctgaacagatggcaaggctgttgacaatggccgaggatttagtggatatgtggcatggtgcgttgttgggacagcctgcatggccattaccactgaatgtagttttgcccactgggtagaaagcccatgttaagtttcagttaaaaaagtggccatccactggctgaatggtggccacacctagtggatctgtcagttagcattttgctcagccttcagtgactcctgccatatggaaatctctgaatcttgggctccacatgggcaaataaagagccaaattatcacctacaagttatttggtcccttctagcaagctccccatttgttcatggagccacagatcctgtggggtcctgactaaacctgatcaagaatgtgccatttccatttgataacatggctctgttcagattgttcagttttactaatggtgtttgtaagtatctaagtgagaatggacagctaagggaccagtgtcacagtcacacatggtgctgaagccttaacatgttcagtctccatcagtgcctaatagcaagcaaggagttgccattcaatataaacacattcagtggctgattcaggcaacttatgtgtcctaagattgagaggctggtgcactcattgatagttttctgttgctatacgctccactgagtatgcatagaggttgtggatacctggacttccatctggttagcaggctgtaaaaatcttagagaagtgactgggccaggccttgttgaacagattccaaggctactgttgcaaaacgcctttttcaaagttggcaactttgttcatgattttgactaagggaaccaaaagaacacccaggtgaggtttatgccgtctcccattcgcaaaggggcctacctgccactgagtctccttttattcagtgggtgccacagcgaccaatgtttccagctgttcagttggcataataattaactatgagtacacagctcactttcactatacatatattccttgatggaagttacagcatcatacatgattagcgtgtcagaaccttcaccacatctgatagggtatcaattcaattacctagggtttgtgtgtcagttttgcttgactaagaatatgttttctcctttctatagagacggctgcacctgtgcaggtgataagatcatgaactgcaccctttgccttacttttttgttgtaaataatttgcccgattcaatgccatattatggaagaatttcttaactgtgatgaaagcacttggaaaatcctcaaataatatttcatgcagaaatataactgaaagaaagacaaatgcatatacaggaaaacaactgctgctcttctcatgttggatgaggcctgctaaaaacacctgacaccagctgttagtctgatccttgatgtctggtacaatcttgggttattctccttggaaaagtggatgctcagaagtgccagtatccccatgagtcccagttaactgaaattcatattgttaagcccatgcatggatagtcatgacatcagttcatgagattccctgggaaagctgggaaaggtaactgatgaagtccatgttttgaattattttaattattttgagctcctgcttctaatggcctttagataaatattcacttggaaaggatttattttttctactggtccttttttggaaggtccagtcatatctcctccagagtgactttgtgtccaatccttcagatgtgtttcttctaaggcctgatgatctgtcaaaaccactagtcaagatagtgatattgttggtaatatccagagcggggagaggacaatagtactcccaatattgcgggaggtgtacacccctctttgtgttattgttcttaatatccagggggaaaacaggatgacgttactaccaatatcgtggggggtttacaccctcccttgtgagattcttcataatatccggcaggggggtggataggactatattattcccaatatcgtggggggtgtacacccctcttgtgatattattcataatatcctggggggagacgacaatattactcccaatatcgtggggggtgtacaccccttattttgatattgttcgtaatatccagggttggagaggacgccattacccccagtattgtggggagtgtacaacccccttgtgatattgttcgtaatatccagggagagaggaagatattactcccaatatcgtggggagtgtacacccccaacttgtgatattgttcataatatccaggaggggagaggacgatattactcccaatatcgcccgggctgtacacgcccccttgtgatattgttcgtaatatccgtgggggaagggaagatggtattacttccaaaatcgtaaacacattgtgtgtacacccccctgtgatattgttcgtaatattcggggtgggggggagaggatgacgttactttaaatatcgtaaacacgttgtgtgtacacccccccaccccacgatattgttcataatatccagggagagagaggagatgatattactttcgatatcgtaaacacgttgtgtgtacacccccctgtgatattgttcgtaatatccgggagaggagagtatgatattactcccagtatcacggagggtgtacaccccccgtgatattgttcataatgtccagtgggggagaggagatgtattactttcaatatcgtaagcaacttgtgtgtacaccctcctttggtattgtccataatatccagggtgggagaggatgatattactggcaatatctcggtggctttacacacccctgtaatattgttcgttaaggagttaagaggatgatattactcccagtatcgcgggggagtgcacgcctctgtgatattgttcataacatcttgggagagacaggaggaaattactcccaacatcgcggggcatgcacagccccctgtgatactgttcgcaatatccagcggggaataggatgacattactcccaatattgccggggatgttcaccccactgtaatatttttcttaatattcaggggggaaggatgatattaatcataacactgcggggggtgtacacccttctgtgatattgttcattgtatccagggatggttggagatgatattactttcaatatcgtaaacaccttgtgtgtacacccccctgtgatattgttcctaatatccagtgggggaaaggataatattactcccaacatctcgggaagtgtacacgtccctgtgatatttttcataatatccaggggggcagaggatgatattactcccaattttgcggggggtgtacaacccactgtgatattgtcgtaatatgaagtgggagagaggatgatgttactcccaatatcgccgggagtgtacacccccctgtgatattgtttgtaatatccagggggggattggaggtgatgttagtttcaatatcgttgacaccttgtgtgtacacccgcctgtgatattgttcgtaatattcagagggggagaggatgataatactcccaatattgcggggagtgtacaccaccatgtgatattgttcataatatccagagaggggagaggatgatattatgcccaatatcgtggggggtgtgccccccctgtgatattcttggtaataatcggggggagatgacattacttccaatattgtggggaatgtacacccccttttgatattgtttgtaacatttggaggggagaggatgatattactcccaatatagtggggggtgtaaaatccccctgtgatattgtttttaatatccggggggatttgagatgatattactttaaacatcgtaaacaccttttgtgtacacccccctgtaatatcgttcataatatccaggtggggagaggatgatattacgcccaataccacggggttgtacatacccctgtgacattgttcctaatatccaggggaggaggggttgatattattcccaatatctcagggagtgtacacctccctgtgatattgttcataatatccaggggtgattggagatgatattactttcaatatcataaactttttgtgtatacacgcccctgtcctattgtttgtaatatccaggaggggagagtatgatattactcccaatattgtggggggtgtacaccctcttgtgacattttttgtaatatctgggagggagaggatgatcttactcctagtattgcaggtggcgtactccctgccatgatattgtttgtaatacacagggctgccaggatgatattactcccaatatcttggcattgtaccctggcccagcatgatgttgttgttcgtaatacccaggcagggagaggatgatataactcctaatatcacatgcagtgtaccccctctgtaatattgtttgtaataccctgtggtggagaagataatattattctccatatcaggggtgatttactcctcttttgtgatattgttcctagtaccctgtggtggagaggatgaaattgctcccaatatcaccaccgatgtgacattgttcataatactcagggcaagtctttcctgtgtttgtcccatgatagggaataagtctcttgagatctgatggttttatgaagaggagttctgcacaagctctctctctttgccttttgccatccacgtaagttgtgtcttgctactttttgccttctgccatggccgtgaggcctccccagccatatggaagtgtaacttaattaaacctcttttttttggtaaattgcccagtctcggatatgtctttattagaagcatgaaaatgggcaaatacagtcaattggcaccaggagagtgggccgctattgaaaagatacccaaaaatgtggaaatgactttggagctgggtaacaggcagaggttggaacagtttggagggctcagaagaagacaggaaaatgtgggaaagtttgaaactccctaaagagttgttaaatggctttgaccaaaatgctgataatgatatggacaatgaaatccaggctgaggtggtctcagatgaagatgaggaacttgttgggagctggagcaaaggttattcttgttatgttttagcaaagagattggtgacattttgctcctgccctacagattggtggaactttgaatttgagagagatgatttagggtatctggtgggagaaagttctaagcagcaaagcattcaagaaatgactcaggtgcttttaaaggcattcagttacataagataagcagagcataaatgtccagacaatttgcagcctgccaatgtgatagaaaaggaaatcccatttctgaggagaaattcaggccagcagcagaaatttaaaaaagtaatgaggagcccaatgttgttaatcctcaagacaatggggaaaatgtctccagggcatgtcagaggtcttcatggctgcccctcccatcacaggcccagaggcctgggaggaaaaagtggttttgtgatccaggcccagggccttcatgctgtgtgcagactaaggacttgttggcctgtgtcccagctcttccagccatggccaaaaggggccaatgtagagctcaggctgtggcttcagaggccccaagccttggcagcttccacgtggtattgagcctgcaggtgcacagaagtcaagaattggggttgggaaaccttcgcctagatttcagaggatgtatggaaacacctggatgcccaggcaagaagtttgctgcaggggtggggtgccatggagcactgctagggcagtgccgaagggaaatgtggggttggagccaccacactgagcccctactggggcactgcttagtggagctgtgagaagaggggcactgtcctccagatcccagaatggtagatccactgacaacttacaccgttcacctggaaaagccacagatgctcaacgccagcccttgcaagcagccaggagggaggctgtactctgcaaacctacagggacagagttagtcaagtccacagaaactcacttcttgaatcagtgcgacctggatatgagacatggagtcaaaggagaccattttggaactttaggtttaactgccctcctggatttcagacttgtctggggtctgtagtccctttgttttggccaatttctcccatttggaacagctgtattaacccaatgcctgtacccacaattgggcctaggaagtaactatcattcttttggtcttacaggctcataggttgaagggtcttaccttgtctcagataagactttggactgtgaacttttgagttaatgttgagatgagttgagactatgggggactgctggaaaggcatgattggttttgaaatgtgaggacatgatatttgtgaggggccaggggcagagtgatatggtttggctgtgtccccaaccaaatcccatcttgaattctcacaggttgtgggaggtacccggtggttggtaattgaatcaggagggcaggtcttctctatgctgttcttatgatagtgagtaagtctcatgagatctgatggttttataaagaggagttcccctgcacaagctctctctctttgcctgccaccatccacgttaagatgtgacttgctcctccttctgccatggttgagaggcccccccagcttatggaatcgtaagtccattaaacctctttttttgtaaatttcccagtctcaggtatgtctgtttcagcagggtgaaaacagactaatacaggattcagacagatttagaattttaatggcttcttgatggatttaccaatttataattataaaatgtccattttatctcttgcgttaaagtcatgacctagtttctgttgctcagttttacatgatatgtacttttcatcctttcattttcaaagccattctatattcttactatagtgtgtatttaatgattaacatacatctttgattttaatcctgtctgataattttatgatttacttggaaaaatttgtttatttacgatgcaattattgtaaagttagggttaaacctaccgtcttgtttcctctgattttcttgattcatgctttcatttgaattagtttaattatagattttttcttatattaacttgctaaatatgcaagattattatacagaagatatcctcaacttattaatgcctaatacacatatagtgtattaaaatttctctctcaaattatttctaggtaagtgacacaagcagaatcaaccttcggaagatcatctatttcctgctgggttgacctggaatgtgtgatatgacctaaggtaacctttgagtcaccacacagacctagagctctgtgtgatgcagcacttcctcaggagcttgcagtggcatcagggcccagccttgaatgccaggcaggggtctctcgactctgtgattcttcccaggaaatacataagaacttgcatctgggttcatatctcaaacgcaacccaccagtctctcacgtactgacctctgctccaagtcttcagatggttatttttcatggggtaaaaatatggcttacatattatcttgtaattctgtttaagatggcatacttatgttcctttattctttcaaacttggtccttattgttgaaacccagctttggagttcagaaaactactttttacttcaacatgctgtggttgagactgtggaaagacttttggcactaggtctttatttttgcatacatttgcagcaacatatctagtaacttaaaaatctagaccgtgaagagttatattttggtactccctgaaaaaagtaggaaaaaatacagtgcctgctggtgtcctggtcaggggtctgccttcggaaaagtggtggggggaggtggaggaggggagggaaactgttttaatattaccaaaccttatcaacatacatatactctagtaactgctaaaccaaatcaaaagaatgtattagttttgcgttgccagtaatcagtctcaattaggtgcctgttacgcagaacgaatttacttgatgaatgaatgtagggaaggaagagaggcttagaatgagctttcattgagctttctcttctctcgtgtctcattgctcaaaggggaggtgtacctcctcctttttgcagactctgtcatgcaaaggccgctgcagctgatgggaacttaaaatgtggtgcctgaggtgtagctgagaaatttatggtcatgagccctcagctgtaccaagtcctctgagttctccaacatcttggtctttaggcatctaagagaatccacagtgcctgctctccacagaaacaacacatctgggcagctaggccacagcaagcagggaggtttgtgttcaggactgtaccattgtgggagaataatgtgtactttgctggcagcaataaaccccaacatcctcagcatccatcctccttattttaaacatgaaatctgtccccgacccactgccactgaacctgtctgggactccagggtccctgttggaaaccaaatcaatcaggagccgtggaggctggcctggcttctgtaggtcccaattcaaataggtgtatccattactgtgaaaggggctatgactggatctacaggagatagaggctggctttccaggggtgacgggcagggagagtagaggctgggtcacacagcatctccattggatcctgaaataataagagagaagtgcaaggttatgtacaaacattgtgagccattttaataattttctgtctgttatttatgttttgctcaattattttttgtgtatgattttggttaatactcccaaaacatacaggtttaaaaagaaccaagatttgcaaagcacaaataagcctctagaagtcacctatcccatccccctctttctgtgtcacagctttcactaaagtacatgtccttgctccttctggaatcttcctcactctcacagatctagacatcacatgccccatcctggaggacaagacacatctaacacgaggacagaacacacatgggaggtggcagggcccacagagttcaccctcccaccccatcatcctccctcatttcccttctgctctcagcagggacccagtgcattagcagccctgggagctgagcagggagcctcactgtgggaaggtgaactgaggagtcctgatcagtcaaggcaaggttagagctgagcttttatctcagactcacaagggaaggtcttccctaggggacagtatgcaaatcccctggtgggtgcagtggggtggaaagagccaaggagaaggtggggacctctcttgtgagcaaaatgacataaatatattttatgtttttaaggatatcaagagaggtaaaatctgtttcctgagtggcagaagggacatatttagatgtttcctgctatttcctctacccaatttctagttcgttaggactttctcaggcatgttttacacttctctttaataaggttgagctttcataaatatttggtgattcttatttcttggttcaggcttatttaaaagagcctaggtttgttttattttattttatttaaggaaaaacacacagtgcaaaaggttcaaatcttaagggtgcaaatgaatgtcaaaatccagatcatttcatgtcatgatccacatcaaaatatggaaggtttccaattctcttgctgctttcattatgcaccttcccagtcagcaactgctgctcaaaacacaatcaatgtaactgatactgtgacatctattataattgtttttttttcctgtacttaatcttcatatcaggtaaacattttttgtagcttctttcttatttctttcattttttgagggcttgattccttcttatcaatttgaattgctgtctgctctcattccctgttattctgaaggattttctcttgaattttccacaaggcacatatgctataatgaattagtctttgtgtatgaaggaacatttctaccttgcttttatgtttaaatgattgttttgctggatatagcatttgtggctgacttttctcccccagcatttaaatatatcattccactctcatcccacctctattagtaatgatgaaaatttagccaatacctttattattgcttcctagtatagagtaagtcagtattttagtgatgccttccaaattctctgtgtctttgtctttcaacattggtactataatgtgtattgttatgaactgtattgtgcttatcctagaagggtttcactgagttactttcatgtacagactaatgtgtttcatcattgtgaaaaatgtttttcattatttctccatttttttctttttcagtttttattttagaatcaaaccatacatgtacagatatgttacaaagttattttgcatgatgctgaggtttggggtatgacagaaattattaaccagttagtgaacattgtacccataggtagtttttcagcccctgccctttctccctttgtgttccttctagcacaatgtctattgtgcccatcaaccagggattcaataaagaaactgtggtatatatgcaccatggaatactatgcagccataaataagaacaaaatcttgcccttgcagaaacttggatgcagctggaggccattttcctaagtgaacagatgcagaaacaaaaaaccaaaaaccacatgttctcacttataagtgggagctaaacatggggtattcatgggcataaagatgggaacacatttttagcctctttctgtcttctcctttgtgattcctaatacaaatttgttggtattatacacatggacctataatgtctgaggttttattcattcttctttataattttttccttctttatatgagaccatttctattgacttgtttttcagttcactgattcttgtgtcatcttaaattgctattgagtctatctaatacatttttcaattgagttgttgtacttttcatttctagatttcccagtatgcttgttttcatagttttgtctctgtttgagagcctctattggttgaatcattgtctttacaaattcctttttcagtcttttattataggttaaaataattctttgaacatatatttgataagggtggagcacatagacaccatggagatggaccataaggcagggagctccgaattagattaggtgaattttgagtctctgactatatgatgctcttgtgggttttaattatttcccatgttttatgtttctcatattacaaatagcttttatttttaagatagtaactattatagaaattcagcttataaatccctggaaatttctaacagaaagattgatgaaaagagggtttttttaggcccccacaccagcctctgcctgggacctgactttgtctctgagccagtggaatctgtgatgaggttttgagttgggcagtgaaatcaccacagggcaggctgtgctctgggtgctttggatgacaggaggacactccttcagggtcagtgatgctgggagttcaaagggagactcagcatggagctgcctgtgagttatcccagcaatcctgtttggacagtgatcatctcacaagtgtgctcggaagccactggatggccaaaatgtgggctcaggttggagaaggacaaagctatagggatgaaaatataagactcatttgatactctgaaatatcagtacaaccatcatgaattatatgggaagagaaaggagtcacaagattgtgattttttatttgatattaaaatatgtcacctctgctcatttttccctcaaggatgtacctactgatatacatttaaccaaagtcactgtttttaattttcattttagtaactgacagcctatgtgcagagttcctaaataacgaagccagaccatcattgctatgggtgaagccaggaagtgactgtggatgtgaacaaatgtgagattcatgtacacgtctccaaagacagaggccactgatctggggagaacctgcagtcatttcactttcccatacccagatgagaggacaccttgatctgtgttcatctgatgaactctaaaatctggaccatattctgaaggtgtagttcacacttcttttctgtgctagtgggactctctcactgacgtgtattgtaccctctgcataggacagtctgtgatacatactacttgttttctgctaaacacccatcaatcatgtcatttatgagtcttccataggtgttacctaacctatggctatggggtcttccaaaagaatgggccggaggtggagctgtgaaactgtagctggataaaaagtgtaaatgtcaagaaagggtattgaagtggtgataataataataataatccaaattagtctgggctcttggctgtgattactggtaaatgtgaaagagtctaggtttggtttttattagttttatttcaactgataaagtagccagagtaaagtgcataaatcttgaatgttcaactgaatacagtttttgtgtaattcattgtccaaatggaatgatagaatatttcacattcccttgtgcttccctcatggacaatctttgtcagttatcacccctcccacccagcaaaattaactgtctttctgacatctatacaatcatttaggttttcctgtcttaaactttatataaatagcattaagtgtatttttatctttttagacttggtattgctccttacaacttttgaggccttcatttctttcagaggattcaaggtcctgtcttatgtcatttcctgtgattctgaaggattttctctcaaatgtcttgtaagagacatagctgctatgaatgaatgtattttgtttatcaaataatttttttgctttttctttagatttgaagggtattttcgatggatatagatttcctggttgcctttttttttcctttcagcatttaaatatgacatttcactccttctagcctctattggtcctgatgaaaactcagccaatggctatgttgttgtttttctgtatatagtatctgctttcattcttgatgcaatgaagattttctctttgtctttcaatattttaatataatgtgttcagttattaattcctattgattatctaaaagatttttattgaattttttcatctaagaattttttattacttttgaaaagtttttgtcattatttctccaaagatttcttcagccactttctctttctctcctcctttgtgactcttattatacatttgttggtattcttcactctgagctataaatctctgaagtcttcttttttttctaaactttttctttagactcaataatttctatacctctattttcaagttaactgattgttctgccatctcaatttgctattagacctagctaacaaatatttaaattggtttattgtacttttcatttctagagttccaatttggtcattttttatattttccatgtcttttcttgagcccctacttgccgaatcttctttttttttttaaatattttcttttttatgtcaatgatcatagatttaaacataattatttgaacatctgcatattaactgctttgtagtctttgctaaatccaataattgggacaagttagaattagctttcattgactattttctgttgttattattgtagctgctttatttttattcctttaatattgttcatacttctctgcttttttccagaagttgtgaaactaaaaattgtacatttttgatagcatattatagtagctgtctttagattttgggcttttttattttaattttaacttttttagaaatagggtcttactttttcacccaggctggagtgtggtgctgtgaccatagcttgctgcagcctcaacctcttggggtccagaggttctgcagcttcatcctcctgagtagctgggactataagggcatgccaccactctctgttatttttttttttaattgtaagataagagtgtcactattttgcccacccagcctggtctcgaactcctggcatcaagtaatccttctgcatcagcctcccaaagtactgggattacaagcttgagccaccatgtcaggcctggaatttgttttgtttttctgatcattttttaattttcttcttagtttcttgtctgaacttactgatagtacctgacttatgacagttggagttataatgttttgactttcagatggtgtgaatgtgatatgcattcaagtagaaatagaaattctagtatttacacaactattctattttctctttcaatatagtattcaataaattacatgaggtattcaacactttattgtaagataagctttgtgtaagataatgttgaccaacagtaagctaatgtaagtgttctgagcatatttaggataggataggctgaggcataatgttaagtggattagatgtattaaatgtattttcaatgcaagatatagaaaaatctgtatctcatgtggcgtttgaccacagatatctctgcttctttctgttcttaatattaatatttagtttgattttataggaactacacatgtatctgcatagcgaagtggtcaccaatgatctgagacattttgctcaaatatctggaggttataaatctatcttctgtcaacccatctgtgtgtagtttaaaaagcaaactgcatgcaaaatgcagctagttcttacctccctctggttttactttgcaccggaaactcctagttctcatcactcatatctataacttctaggtcactaggaatatgtgcagagattatttcagcaatgtgggtctatcttatccaggaatctgctatttactatcagcagatgtactacttgcctcaaacaaggcatcatcttggactagcaaggctgtgggctttttctgttcatttcctatggtgttctccctgtttagctggaaacactgaagaattatttcccactccttggcttcactcaagtccacccactttggcagcaagctgccagttttatttgctatccttacatgggtaaaactccagttctgcaattcatattgactgagctgggaatagaagggtgctgtcacaggcaaaaggctacagacattttctgtccttactcaaagcactagtactttttttttctataaagaatatgcatccttaattattttatgctttgccaattttcagagtgctgaaatagttttgatatttcaactttatatttataggtgtgtttgttgtttattcttgcacagatttattaaactctttgtgatgccataaacagagatgccttctgaaatgcgtttaaatgaatgtaatagccacactgaaatggtatgatgtaatggactaacataagtaattttggacttgagaacttgagctccaaaatggccaaatagagcagagatgctaaaactgagtggccaccacactagctgtctgtaaaggaagcagctggtataatctagtaaacactgatggtcttcttgaggtttttgtttcatgttgaatcactgtgggaggccagttattatactgctgacagtaataaactgcaaaatcttcagactgcaggctgctgatggtgagagtgaactctgtcccagacccactgccactgaacctggctgggataccagtggccctggtggatgcaccatagatgaggagcctgggagcctggccaggtttctgctggtaccaggctaagttgctgctaacactctgactggccctgcaggagagggtggctctttcccctggagacacagacagggtggctggagactgcgtcatcactatttctccagtggtatctgaaattggaaataaaacagaaatgcactcatgtaatcaaaatcaaacccactgtctttaagtagagccaaaattgttgatctacattgaattttaattatatttcttgctgagcagaggtggcaggagttttcactgatgtgcaaaaccacctcatattcccctcacctgggagccagagtagcaggaggaagagaagctgcgctggggcttccatggttccgtctgggtcctaactgagcagttcctccccagagctctgacccaggcattgatatgggctctggaaggtagggcagctgggagggacatgcaaagcagctggggtgggagctgagctttcagctgcaaagaccacctgcttcttcctctctgcactgagcatcctgcgccgccctggttgtcaggccagaaaagtctgttggctcagtctgagtgtagaactcctcccttgtgctcagagaatttcgctcctgtgtctttcttctcctcaatcacctaaatccacccagaagatgtttggcacaagcctgttaagaacaatataaaaagctgtgttttcacttctctcttcctatcctcaatatgcccagtcatctccctaagtgcattattggatcgatggaaatgaagagtctgttaaaacttaatcttccagatacacctttcatttgcttgttagtaatgttttctgagggtcctgaagctttccattaacccagccacataccctctttgagttaaaaagtgaaaaacttctgtttacagtcacatgtcctggcagccctgacatagatgctccatggcttgccgattgcttgaaattgatcaagtaacttaacttccctgtgtctcggtttccatatctgtgtaactgtgacaatactggtacctaccttatagtgctgtagacagtttaaagaaaataagataaaacatttacaatagtattcaggacattatgtatgcggcaattaattttgtttttatttattaaatattcagcactacagtcatcatcattatcataaatatacttacttagcacagaaaagagtcttcagtctaatccaagaatgttttatccacagccaaatttaattctaaggcttttccttcactaactctacacaactctttaaatcctaatgatttggtcttaatctgtgctaaagtactcacaccttcaatcattcccacccatccctgtctaactcattaattctcatcatccattatcaaaatgttactctataaaaggttcccatgtcctgttgctgtccttctttcttacacaatctttattctaccctgttatcttttgtcttattcttgccccaggacaataaggaaaagctaccatcattacctgttgacttgctccagtataattttttcaggcttgttaccttggaaatgaggactatgtctggcaaagaaacatattcatcgggtcaatgtgttatgaaataaaatattttatctacttatgatccaataattaatttagacctacttgaacggtttttttttaatgaacgaagaagaagatgatataagaggaaaatacaatacaatagaaaacacaagctattataactcttgcttcacggatttctacatatatattagacatatgctgggtatatgtgtgcaatggtgatccaaaaactgaacgctaactggctgaaggaaagcctgtattacattgggtcttgtctatttttccaattatgaacagaaagctacagtactatttgtatgagtatcaaaccttctagctgctgtgatggaggtagagaagatttactgagactaaagccttggaagtactagaagtttgtcctgtgatgttatgggtgttgctgtggttgttgttgttaggaaatacagtggaagtcaaagcaagtagaaaatttacaagctctgctcttcctcatactcacaaccccttctagagatgacagatagtggcataggaatctctgacacctctaaggaagtcttttttgctctttccgggatctttcctgacaagtattgttttgagtcacagatgatgtggaagtaggtgtagaagaaaggactagagcaagggaagaagttttcaatcccaggtagttgttgtaggcacagggaaatggaatttttcatagatttatgctacacttctatcatgttggggagagaggcatcaaaccaagcttattcttgaaagaaacattacattattttaaagagaaggaactatgcatttcttgtcaaatagatgtttaaaattcaaagctacaatttttttttttgacagtatcttgctctgtcgcccaggctgtagtgcagtggtgcgatcttggctcacggtaacctccatctccctggttcaagtggttctcctgccttagcctcccaagtagatgggattacaggcatgtgccaccacacccagctaataacaggagggagtaaagggccacacaagcatgtacacaagagacaacttttcttcttttttacagaataagtctaaatgtaaaatagcgttataatgtatggactcatgtttaagacaagtctcttggttttctaatttgtgttgaacccaagcagtgttgtgatagaaaatgagtttctttttctttaagctgaatttgaatttgctccaatagcctaatagacaccctagtggtaagtcctctgtgatgctcgccattgtccccatgtctaacaaggatttctactggacatagaagtttttctaagtccaacaagagggaaagagactgggccatcattgttctcatctcagatttccacttcctgcatagaaggtatacatataggtagccagacgttatgaaaatggattgtaagcatttgttagtgaacaaaatatgactcaaacagtatttttattttttatttttaaatttctattgcttattatttgagacagactgtcactctgtcacccaggcaggagtgcagtgggtgcaatcttggctcactgcaacattcacctcctgggttccagtgattctcaagcctcagccacccaagtagctgggattacaggtgtgtgtcactacgtccagctcatttttttttttgtatttttagtagagacagggttgcactgtgttggccaggctggtcttcctgacctgaaatgatccgtccatcttggcctccaaaagtgctgggattacaggcgtgagccaccgcactgggatttaagcaatatttttattaagtaaagtgtagaagaaaaagtgtaagtaaggtgacaataagaaaacaaaatgccgtaatggaaaacgataactttagggcagaaaacaagaaaaggcaaaccaagattcctgtagggcaagcctccaatgcacaatccaaggaggaatgtcaagggtgaaaactctggagcatccagatagtggcccaaaataccaaatgctgaaaacccagaatacccaagtaacagcctatgagtgtccccacaccaaatgccaggaaaccctggagtatccaggggctgaccagtgcagaaaatcctggagcctcagtggggtggccaacaatgagccccaaaggcctggttggggccataaaacaatgtgactctggcttcttagagtcaacagaacaggagaattcttacatccaagtgtcctgccttaaacaattgcacaaacataattagcagggacccaaagaaaaaactgcaaagcaaacacatatatcggggcagaaaataaaataaaatggctgatggataaataaaatggcattagaggagaaatgactaagagaaagaacaatgaggatgtagtcaggtgtgctatgggggaattcaaatggactatctagccaaaggccttatttcctggatcatctatataggcaggtggatagatgggacacttacaggtgtgcaggagccaaaatggggccaagcagtgtctgacatggggcctgcatgaagatctctccaggcttcccagctcggatgggttgggctcctatgggggaactggagcacggagcggctggcctgcatgaagcagtggctctgtggcctcttgcccatccccagagctccaacacctgtcaggaaagatgatggttcttaaaacagcctttggctagtgttaatagctctgcaatgttaacaactcagcataaagtcacacagacacacagacactgtagctttgatcgctgtagcgctgatcaccgtctcatcctctctcactgatcgctgtcttgccacttctccaatagctgtcttgcccattgctgatcactgtgtccatcttctcataaagtgccatctcttgctgtctcttgctgtcttgcttctccgctgtttccactgtcttactgccacatcaaatgctgcttctcaccatctctagtggtgagtggctggctcaatattgatgcaaggcaagtcctcagctttgctcaggaaggaatgtaagagtaagccagtaatagaagaaaacagctttattgatggggcagcagtgttacagctctgtgactactcctgcggagcaggggtaattcataggcagagggccgagagtagcagccaggggcatttttacagtcacatttatacccacttttaatcatgtgataattaaggggtaggttgttcagaaatagctagaaaatgggtggtgttgccccaacttccaggtgttgctatggcaggggcaggaatttccaggtgttgccatggcaagcgctgtgacttctggatgtttctatggcaatggtaaactctcatggcactggtgggtatgtcttatggagaggtcctttcagaaccctgttcctgttttggccagcctcacatctggtcctgagcagagtcctgcctacctcttgcctcaaaagtaacaagaaatctgtaatgaaaatttacccagacagaaaactccaattttatatttggtagttagtgacatggtacttatcaaagttacacaaagattcaagtgaataaaaaatactctcagaattattataggaggtcataatgtcctgtagtccaaaaattaatatgcacataacaaaacaaagaaattaaaggctgatatccattgtgaatataaaaataaatatcttaagaaaaaaagaaaaatgcaatcccactgtatatctgcacatttagtgaacacacattgtaaaaagtgttacagtttttataaaaactcttgataggtaattttaatttctgaaaaatgtatatgaactataaggtatgttggatctcttcccctaacttaaaaaatatttcttcacatttaaattctttaccaatttttaatgactttttattgcttagaattttagttgatataaataagaaatgtgtattaaaagcctaccattttgatttaacctatgaaatatatttaaattcttggaaaaatccaaaaatacctagaaaagtgagctcttgccagaagatacacagttctttagtgtcaggctgagattatctcccagaaataacttttggctcatatagcttccaggacactgcaagaataaaagatgtgaagacaatgttacttaattggatttgcaattattcactattcactgttaaccaattttattgaaaaaaaagattccaatcaaatacactgattttaagtgtactgttgggtttaataaataaatacattcttggaagcaaaatcaatacacacaacatttctgtaactccaaaaagttttgtcctgctcttcagcaatcaacttgcttccacctcacagaacagaccatccttattcagcttattgttagtatagattccactatctttttaagaatttcacataaaggaatatagcacatgttcttttgtggctggtgactttcgtgcagcataattgtttcctaggctcattcatgtcgccttgtgtcctcgtgatgtgttactctttacttttgagtactatttaaatatgtagtaatttcacaatgtatcccatcacctgctgatgaccatgtgggttgtttccactttgggctattatggataaagctaccacgaatggcattatacaaggctttgcatgaatatttctttatttcttttaggcaaatacctaggagtgcagttactgggtcttacagtaagtgtttaatactctgtcatactgttttccaaagtggttataccattttacatctcagcccagaattgatgagagttctcaatgtttcagctacttgtttttaagactttttcttaatcatcactcaacagtgaccagaatggctaatgatcattaagtcatgttttccttacaatttccttgacttttgtgggtgcttgacttgtatcaggatattgaaaacaggatcaatattgtcttaaccccttttaaacactttttctaagtaatgatatttaggatgataacaggagatctaaagggaatgttgggagtagtaacaggcattatccaatatttattatcatactccttaagacaatacattttgagtgaaatagcattcagctagactagggataaaaaggttctaatctcagctttagcattaaatattaggaaacctctgagaaaacaatccaggaagacaaatcagagggtgttttgctagtggagaagtgctgcaacacctaaaacctattaatgccagatttttgcagtgatttccactcataaagttgggttgactcctagccttgttctcctatgtgtctgtgtgactttatgctgaggggatgtgacatcacagagggagaagtgcacttgtgtacagaaacatggcttaggagattggctttggatgtggctgcaatgaaatatatattttgaagaagtcccctatgaaatgtcttatacattgtttcttatggcagggtgctcgggctcacacctgtaatctcagcactttgagagaccaaggaggaaggatcacgtaaggccaagaatttgataccagcctgggcaacatagggaaaccacatgtgtacacacacacacacacacacacacaatttgtgaacagtggcatcacgaagtgattatttatgaacaattggctaagaaaattacaaaataaagcaatgtcttctgagctaacaatactataataaagatgtcaattatttaactgtagaaaatacagagaacataaaattgtctatcttaaccatatttaaaagtgcagtgcagtggcattaagcatattcacatgttctgctattattaccgatactgtctccagaattcttttcgtcttataaaaactaatatctataccccttaaacaatactccccccgtttcctctatccttatccctagcaacctccattccagttctgcctctatgtcagtgacatctttgaagcaggttcactgtacactggttaccaacgtacctgagcgcgaggaacacaacacccccacacagcaagttacatgaagggggtttattattacagataagcagcaagggatcacaaaactcttggactcattatggatctgtcccccaaggcatacgaaagttatgtggagctgatagagtcgactgtgtgtaccccgcttgcatcacagctcaggaatccggaaaagcagacactctgggttttatatcctggggtaatgagacgcacagggctaacgtgcttaaggacattccattctatgagaaactggaatacagcacaggtaggctgttctggccagttcctctctatctcaggatgttacaattccagcacattctacaattattcttgagaactcttaaaataatcaagaaagtggagagaactaagtcagcccagggtcattggagaactgtcttgcagttaccccaccacctagacatcccccttagtaaagctagcatatttcctacacccaccaatgtcccccaaactgaaggcagaggtttatcttttcagattgacgaagcaccttgatttacacaatctcagtgcagattattaagccatagtgagagtacatttcgctggtctaaggaaggctactaccactggcaggagggataagacccccaaaagcagtgacctagtctaggatcccatgatcaagaaattaagatgccaaagaggtgaaagggggatctttcagatgccccattgtctgcagccattgagcctgcatcaggatcacctctacttatatttctaggatacctgaggtgtttatccaggtacagaaggcagtgttgggtgttggtaattacatggaacatccgttatgttccacgagaatgtgcccattgtcacgctgattgggcagtgaggttgtttcttggtcagagtgaagtctcatggagtatccaaaatatgacataaattcctctcaagggtggccatggtagcccgagcatctaatagagtgacatatatttagcagtccaggaagcaagctattgccatagtccttttctccacacaggggatcctttagtagttcagtcactcagttgctgttttcctgaccagatgactgggttgttgaaagtggcccatgatttaatggaaatggagcaaaatatagtgttaggggcagcctgcatggctgctatcattgtatgtagtttggcccattgggcagaatggccatgtttagtgtcaatcaaaagatgccatcccctggctggatggtggccacacccagtggacccactggcatgtgttttgtacaatcatcagggccccatgccatattgacataggcatgtctttgaatctttgactctatgtggccaaaggagaagctgaattgtcccctgtgggtcatttgttcccttcttgcaagcttgtcatttgtttatggggcacatgggtattgtggcatcctggttagggctgattcttactgtaacatttccatttagtaatttggatctgttgggcctgtccagttttattgattgtgtttgtaggcaccaaagtgagaatctgtagttaaggtagcagtgtcactcctggtcctctagctctgagatactcaggccctatcagtttcctacagcaagtaaggagttgccattcaaaagaggcacaaatggtggctgcttcaggaaacatttgcctccaaaatctaagtctggtgcacccagtgacaattttacattgccacagactccagtcagcatgcctagaaatagtggacacctggatttacatcgagcaagcaggctctaaaggtcttaaagaaatgccttggacatgtattgttgaatagattcgaaggctaccgttgcaaagggctccattcaaagttgtcaaatttgttcatgcttttgactaaggtgaccaaaaaaaaaaaaaaaaaaaaaaaaaaagactcagggggacagtgcagctaggtaagaatccagtggctttcccgagcttatttgtcttgcatttttggtgacatggattgttgttcatatcggcttcctctggcaggtccacctggaaagcattatatttagcaagaataaaggaggctgtgaatgatgtcactgcggactgcgtatattccctgttgcaaatgtcaaatccatgaagcaaaaagggatttactagaggttattaaattccttacaaattgttgaaaagccttaaaaaacaggctccagtcaaagcctctagaacaattccaagaatcgtactgctggcacaggtcgggggagcatctcctgcgcctgagactccacattcaagctgtctcttgcagcagaagagagagcagctcttctcactactgcccccagaaggacagcagctctggtatcaactatcaactgctagaaatctgacccctttctctgactgcccatcagatgtgttactacagagtcgttttggattgagatgagggaggggaaatgcctgatctcactcaaatgtgctcattttcctggtctgagtcacagccaggcagcacagtcctgtgggcacaatatcttcacttgccaggttcctataaaatgggagtatctttcttgactgtggaaaatatggaggcgaggagggtcaagcaatagcaaaaggagtacttggagttgcctgagcttccactctggtttccccaaatgttttcaatccatttaattcatgataataaacacctttctgcctaaccagccataatcgcttttcttaggtccaaatgattcagtgataaaactaaagagaaaaaataaatacacttttcaacgttgaagctgaccaggtgtctgtctctggtgtttacccctccacatcccacgatgtgtttcatcttccctttgcctcactggagatccaagtgcaagtaatgcttcacatgactgtgatccctagaacttcatcctgatgactgttgaaatcttctctgagttttaccagtggaaatggcaataaatagaaagattccagaaggtcccctagggtccatattttctgtacttcctctctaaaatatgtaaagtcaattatgtttgctcttgctttatatgggctagatctatggccccagcacacatctgaacgccctgtgttgacaacttatccagtattgtattgagtctgaatggtcacatgcttatcatatcatttcttccaatttcatgcaataattgtcatgtcaactgtttggattaagaaccatcagccagaaaaccacagccctgagaaaatagaaatagagtatttcaagctgttcagtgggcatagcaatgatgagtctacagctcattttcaatatataaatattctgtttatgagagtaacagtgtttcagagcctccaccacatctgacagcataacaatgcaatagcacaagagtttgtgtgccagcgttgcttgactaataatgggtttttctttgtctatagggtaagctgcacctgtgcacatgacaagatcatgagctacactttgcttcactttttttgaggtcaataaactgcttgatccaaagccatattatggaagaaattcctgactctgatgaaaacacttggaaaatcctcaaataatattttatgcagaaacataaccgaaaaagaaggcaaattcatatattgcaaataaccagtgccttcctcatgttgcatgaggtccactagaatcacctgacaccagctgttagtctgagccctgatgtgtggtacaatgttaagggttcaagaggcatcagttttcttggcaaattaggtgttcagaagagccaatagccctgtacatctcagttagttgaaactcacattactgagtccccacagggaccttattaacattggttcatgaggctacctggggaagctgggaaaggtgattgactgaagtccatgtgttgaatcatcctgattattaaaagcccctgcttgttaatggcatttcacttaatattcacttggaaagcattttttttattatggctcatttttgaaatgtctggtcatagcttttgcagaatgactttgtctgaaatcagcctgttgcatttattttaagacttgatgatctgtcaaaaccaacagccaatatttattaaactgctgttatcttgcaatgggatcatcagatgtaaccattgcagtttacccacggttaggatttttacatttccagtgcttctttgacaatgacactaatgtgactctatccagcgtgcattgttgtgagaactctatttggcctatcatcattgtgggcatgaacataatggagactttcataggatgcaatggttaatattcaacattagtcaaaatttgctctagtcctaccctcggagctctactgggttggaaaaatattttaggtaaggacaaccatttggtaaagttttaaaaataaaggctacaaataaattttctgtagcaagagtattgcatacataatagaataaatgtgcttaaatatgaatactatatatatttgtagccaacattttatcaaacaaatatatattcacttctatgtatcttatatatatgcacatttttccataaataaggtaaattttaattttttattgaaatactagttttaattctgttcttaattttctcttaataacttcataaattgatcactaaatattcacatttataccaccaatttaagaaaaaaatacatatgtttatatacacgtagaggtgtaaataccgtatcaggaagcctttatgcataatgattggttactggttaaatacacaactcagtgacagaaaacagtaaacatttgttttcgtgttcatggatgctcacgttcacaatcctctggctgaccaaggaagggctctgatgagtcgttcctctgcagggcactgagctcaccttcagcctacagatatgaattgtctgaggacaaggctgaacagcagtgactacacatgacacaagattcttgtggcaggtcacaggagtgaacaacatcccaaatcaaactgcacagttgaatttaagtccaataatttctaacatagcttcacacattttaaatatattcctttatttcagtgagtacacattttcaagaaaatgtttactccatttaattatagaagggtttgatcattccatgaacaaataattatgttttcaaactttacaatcctgaaaatatttgcaaatgtaaatttgcattaataagaaaataaagctggatgtgtttccaacatgtggcttcaaatataatttatttaaatggactcattggggtaaaaatcattttaacttatgtaaatatccctttttgctgtgcttgtgtcctatagagttgcccaataagagttcctcccgtgagatttggaaatcagaaaaggaagactcaatattatccattggtaactaagacaggtacaaggacagaggtgaggactggagaaacacctggaaggatgttgcaggaagctaagagcatcagcacgcctacccctaagcttccagacaggactgaggaccacatggttagaaagcccttactttaggggcggatgcattctgttttctgagggagaaccagagaatcctgcctctaatatcaactttcctgactactgtatccttgtctttgaaaggctgtagtctgaacgttaatcataggcattggttcattcttgttatacccaacagagccaagaaacctagtggggaaaggcactcagggtgcaaaatattgctgctggaatgcaattgaaataggccctgttatcccatggaactaaggtttatggttttttgaataaacttagaaattgtctccccctccctgtcttaaaactcaagatagttacatctgtcttacctgagtcctttttttcagtaaaccaaccatcaggcctcccagatactattaagaagctgaaacttacatatcactgaattgggacagtgagacatcagaaccttcacccactgtgattgcataactgacctcctgcttcttcttgaccaaattatcttccttacccctccctaattcctgttttcaacatttcttccctcctatataaacccctaattaattttgtcagagagatacaattgagaatggcgtcccatctcctcggctgcagcacctgattaaagcctgttccttggcaatacttgttgtcttcgagattggctttctgtgtggtgagctgcaggatctacaccaagtccctggtatttcagtaagaaaattctctgcaaccttcagtgctttggcttattgtaacctgaaatcaaatttatccacaatttctgagataacttgatataactctaggattcactttgtccaccactgtttaccagtctgagcttgccagctcccaacccttcctagtgccaatgaactttctcaaagtgcaataggtaatatttccctttttcatggaacactgactttttctttgttcttccaacgtactgaagaccactgagttttcctgtatgcctcatttggcaaatatttctcttcaaataaaacattaaatttagagattcatctctacattttatttagacttcagcagtttattctaattctctgtattaagactattcctgcttagaatatctatagtggcttcttctgcattatgatttccaactgaagccataaactagactcctcaggtgtcatgatctctgtttttattaaataaggagaagcattgctatgtctgtgcagttggtgctgagaaagagaaaagaattagggtgcagaggtgacttcatgtccccatctaccaacaccatcagagtgtggctgcatctgaggaacactctcagctgatggaggcatcaggagaagctgctggggcagcccagcctcacacatctgcttccctgggggtttatgtttgggtgtgtaacactgtgggagggtaactattatactgttggcagtaataagttgcaaaatcttcaggctgcaggctgctgatggtgagagtgaaatctgtcccagatccactgccgctgaactttgatgggaccccactttgcaaactggatgcagcatagatcagggacttaggggctttccctggtttctgctgaaaccaggctaaataattgctaatgccctgactcgcccgacaagtgatggtgactctgtctcctacagatgcagacagtgaggatggagactgggtcatctggatgtcacatctggcacctgagattggaaacataaaaacaaatgtccacacaattaatcatgttgtaagagaatttccctgaatagtaaagcagtactgagcaccctgggctgagtaaactgctagtgttctccatccttacctgggaaacagagcagcaggagccccaggagctgagcgaggactctcatgtccatgctgtgtcctgactgggtctgattcctgcacaaagtctgaccagcctattaataaggcttcagggcaggaggttgtgctctgggaacatgcaaatgagcaggggatggggcaggctgggcacagctgcagagctggcgcatctcagtaactcagcaccagctcagtgtccccacgtgtcccaggtaagatcaaggtagctcaaatttgtctgcagagaatgtgtttctactggggactattttgttatgggaaacattttatggtttctttttgacaatttgaaatattccttgggagtcgatggagcaatgtatttcattggtgtatggggattatttaggagaatattcttttttgtaggaaacacatagtaaaattttagaccctacaattttcaggtcttcaaaagactctcatgtgatttctgttagggaaggtggtacttatcatatacttgcaacatttctgtgagtttaacattgctcctttctaaaaaaaaattaaaaataaaatttattcacatgatgctacatatatttgtaaatgttaggtaatggtgttatgccattgttcttaccactgtaagatcaagcaatttacttcagatacactaagttgataccgtgtttcctcaatgcatgcagcaattacagatccaccattatcaagagctctaggtctctttaatatccagagactaaatgggctgcaccttattcctgttttgcaccttattcctgttttgggcaccttcatagtctaccttcttttctgccattaagtattatttcccaacattcatctctcttagtgagggtgatcactgcatggagcatgtccctgccatgcaccataggtgacactttcttcttttactttttatcagggacatcatcctgacccagacaccaagatccctgttaacatcttttggaaagaggcactcaatcttttatcaagcaactgcccaggtacatggagaaatcagttggttccagatgaaactggacagggatttgcactcgttatatctcatatctctaatgtgcccaaaaatgtcccggcctggttccgtgggaggggaagtggatccaactacatcagcatcagtgggctgcagcctaggactccataaaattttactgatgcctgactaggagagccaaatcacagtgctgtagcctctgcacaaaccttcctgctgctttataagctgcctgaattttaagggaaattgcttatattggaagaaaggaagaaagctccatttgtcctctaaatgtttgctgaaaataaactgacaaaaggaagattaataagagaaaaggcaaacaaaattcacttaaagtgcagcaggatatcatagcaaggtgattacccagataactcaatgagatccaggtgtttatgtttcctttctagggaagaggtaattgggaaatgtaggcaacctggagagaatagatgagaatagaaatgcatcctcaaaagaacaggtaatcacctccctaggtaaagtatcaactttgagtctcttccatttttgattcctcttttgtgttaatcttccttgatataaaaattctcaggaagagttttcttaaaaattggtttccttctgaagaatttgcttttaggcaggtaggggatatttaggaaaagccccctgtgcatttcctgctttctaaatgcctttggttttatataatcatcatacaaatgcagcacagtttgagatgttattttctggattcctttacttgcaacccacctgccaagatcctgttccagagagatgtggctacagactgaaagagcagttgtcccctcaacaacgtggaggttggggcactgaccactggtgcagatgaaaacctgtgtagaacttttgcatctccaagttatgtagtaatagattacttttgactggaagccttaatgataaaataaatagttgattaacccttttttatgttatacatattatatactctattcttccaataaagtatgctaaagaaaaaatgttattgagaaaaccttaaaaatgagaaaatatatttagtacttattaagcgcttgctcacaggtgacacacagaagaaaatataagtggatctgcaaatttcaaacccaagttattcaagggttaactgtaccatgatgaatgtagcagtccccatctatagtctagggcttttccctttgctgtatctctgctcatttccaatggctatatatatgtcttatgtgcttcatgatcttgggcagagaggtctgcttgcatgccttgctggccagatggcctgcaatgtgtatctcttaggaaagtgctatggtttgactgtgtcctccagaatccatcgttgtaaagttaaatctcagtgaaatggtattgccaggtggggcctattgagatgtgttagatcatgagggtggagccctctagtggaataccttaatgccactataaacagggtttatggggctggaatctctctgtctcttctgctggtctgtcatgttaagacatggccttcgttcctttgaaggactgaaagctccaggcgtcatcttgaaagcagagaaagacgaccttaacctgcccatgccttgatcttaaatttcccattctccagaaatgtgagaaaataaatttctgttctttatgaattacacagtggcaaggaacctaacctgttatagcagcttgaaagagaacaagagagacagctcacaatcagtgaggacagaatgaggtgtatacataccttagcttcctcgtctctcaggtggaatagcccagaggaatttagtccatgtttccacatgtggttgatcttcagttatcctgagtcaggtgggttgttgatgtgtcttttaccattcatcttctgttccctccctcactttcttcctttcctcccagtgtaaatttgctgcctaaacaggaatcctcattgctggtggacccaaactaagatagtaaataaaatcattaatcttttgtatgaggggtatttctcatctgaattcttttatcatttccctttctttgacatgtaggaatattcaggaaacacacaattttttttttaaccaatctattttagattgaatttatgcggtgattttttgtgtgtgtgtgttaaaacaaaaaattacgttgtaagccactaaccagctgaacggactcctcttttggtagagagaacttcaaagaaatctgaaaaactaggttaggccatgactggcaggtgggtttagatgtacctcattatatggtccttcctttggagttcagacacaactgaccagcattatcattacaacagagatctttggattgacaaaacagatgctttgtagcaataagataccatactccaacacgacagataataggccctgaagaaaatcaaaatattttaccctaaaagtatttctttgacatattctgaagtggccctgcaagctgcctgttgtgggggaaatttgcattctgcagagaatctcctccccttactaagtcttttccaaagagtctgacattttttttaaggtctgataaacaacattagccacctactttgtttgctacccataggattcatctaggtgacaagaacctttgcttccacacccccttttctaaactcaagcatttctttatgatgaattcaagtgtttaggcagagcttaactctttcaaccagttggcagtcaggaaatctttgaatccacctatgacctggaagcccctacttcaagctatcccacctttccaggacaaactaatgtaaatcttatatgtattgatttatgtctttccctgtaatttctgtctctccaaagtatttaaatgtgtattcttgtcaccctgggcacatgtttgcaggacatcctaaggctgtgtcacaggccataagctttgggaaaataaacctataaattgattgagacccgtctcagatactgttttgtttatactggtcacaaacttaaaaatcctctaaaacaatctacacatcaataaatctacattagagacagtggaatgatcataccttaacagttaaagctcacaatttaaaggaacctgagtctaagattttggccagctctcttgcttcataaaaaatacttcgtgatttttaaaattttactttagagaaaggcaatttgggggaatatatttattgtcaatgggatgaataatgtctctaccctaaaagatgtccatgtcctcatctctggaacccaagtgttacaggagttattaagaaattattttaggcagataggaaaagagtgtccttggtaaggttttctttcctttaaagcagctccagaaacgtttcttgtctagcaggaaagccctggctcttagagccaggctgggaagctttgatttgcaaattccggccattagaaactgagtccagccaaacctgtcaattcccaccatcttcttccttgcccccacatgtgcctgacaacaaggctgcccccacatatccccatgtgtagagaatattttggcaccctgcatttgcatattaaaagtcttgttgggaaggccagttattttgcaggcttcatgaatggcatgcctggtcaaaccagtccctagagccctatataaatcagacaccacctcctccagcctcctcatataagagccacttttctgctgcaatggagttttgtctttgttggaatccctcctccctctgtctctgtgtgggggagctgttttcttcttccttccttcttgcatattaaacctttctctccctaaaaccactccacgtgtgtctgtgttgttttatccaaagtggtgtgagaccaagaaccctggtgttcctccagtcaacggagccgtatcataaaaattctaccttacatagcaaaaagagaacttgacagatataagtgaagaataagcgacccagttatctagatgaaaccaatatgatcacaaaggtccttaaaataaaagaggaggcttgcagtcagagaggagctgggacaatggagagggatgtggtttgaagagggaacgggttactctgctacaaaaaaaaatatgaccacgggggtactttgcttaaaaaatatcccagaatgtcctgctatacttagagagcatttgcttcccaaatagaaaatgaaggcctccttcatttcacaccagtttctgctacatgcactgtatcgctctgttgcttggtgtctacgcacttagaactgctctgtcttctttccgaaatgactttcttcattatgtaatgtacatttctgtcactggtaacattcttggctttgtagtctactttatctgatattagtatttgctactgattcattttattaattttgcatactatgccattttcttttcttttatattgagtctacttctagtgtcatatttgatgtgagtgtcttatagacagtatactgttcggacattcctttttgattcatcaattgctgtctgttataatttactaatttgcatatttaatatatcgataattattgatatactaagatttaagtctttgctctacttttttgctgtatctttttttgcttctccgttttctttttgctgccttcctttgggttacttgaacatttttagaatttcattttaattttacctaatttgagggtatctctttttatagtgatttttaaattggttgtcatggtatttcctttatatccatagcttctcacagtatgttggtgtcataatattaccatttaaaataaatataaaattttaccttgttttatgtcatttttcttcccccattagtaatagattgtgcacatatactcatgtacccttcacaccatctctagcctacttataatacctgacgcgatatgtatacatgacttaacctgtgtggattcaaccaagtggtactaagcacatggtgaagtcaagtttttctttttggaactttgtggattttttttctatatatttttgatccaggtttagttgaatccatggatgcagatcccatggatagagagatgactatactgctccttataactctgaggatcaactctgtggttcctccattctgggctggctgaactgatctctgctgagcctgctcatgtgtctgcagttaccctgtggttcagttgtgactagatggtctgatatgacttgtttaacctatctggaagctgatttgatgtgcaggttggacaacatttggtttcggtttacataggtcagggagatggggcctgttccccaacctctattcagttcgtttctagatcaactcaggagttcgtctattcattgtaggttgtttgggggaaattccacacagaacattggtaatgaagaagctgaactgctgtcatcagttattgttatcatctgaaatgcatcatatattaccaaagtctccccagggtggcccaacagtgcagctcagctcaccccatccagtcacttccctggttgcctgcaggtgtgagaaaggcaatgtgctcagtcacaggaaagacaggggccctccctggtgctgaaacctgcagatagttttcacacagtttcattccaaaatacaaagacttcattttctttgtctttaaaatagttatacattttctttctataatgtccccatgcttttcaactaatttgaattttcagaactggaagtatttattatttctgtgttagatgctcttagtcacttatggcaagagtgagttaatagagacaggatatggattagccatagaacaatacagaagtgtgtggattcagataggataaagatcaaagcggtgacaaatacattcttttgaagcggattctcataggtcaccagtcaatgtccgcattcaaggtgcgatgatgtgtcagctacattgtgcaaatggtcagctctgcagagtaaacttggacagcacactacaggaccaaaattacctgtaaaggtatggggaaaataaaccatcatagaaaaaatagtgtgaaggagttctcggttatttatacttggatatcaagcagaacactataatcaatgaagctataacctaaaaactttaagacttttaaagaggtttcccttttctcagggtatttctcaggaaaaaatttataaattatggataaactacttgcacaattagctacaataaatcccttccctgcactcatcctttggttggcctcattctaaatggactcaggtgttacccatgtgtcttgctcaggccaataggataatagcagatgtgacagaattggaatattggaaagggcttgcacatcgaagctttcctctctttcacagtgcttggaaaccctaaggtcacaatgagaataagcctgtgcccatctccattcaatgtcagtggcatggctgctcttaggtctattatttgttcttaaaatgtgtgttcagtttgttataaacatgtaagaaattacctgcaaatttatcaacttaagactacacccatttataatctctcaatttctgagtcagcagtcagcacatggctttgctggatcctgcccattggatttcacaagactgtgccacagtgtagactgttcttcattctcacctgagactccctgagaagagagatattttagagctctttcaggtagttgcagagcccatgccttagcacctctgtgactcagggcttcagcttcttactggctcttggctcaaggctgctctcaggtcccagaggctgtggacaattccctgccatgtgatgctcacacaggcaatgcccacatggctggttgtttgttcaaggccagcagaaggtttcagagagtgtctctttccagtctgctatgacagaggcttacagaatacaatacaatcattggaaagacatctcataacctctgccataccatatgggttagaagcaagcctaagttctacctgttctctgtggaggtagatcacacaatgccatgactcactggagacaggtttctgctagggtgttctggcatctttagtttcctcaaatatcagggtactcgtactgagtgtgaaatctctcctacatctacttcatcgtgctgtgtctgactgatcagacatttgacacatgacttttttttttttttgtgacggagtctcactctgtcgctgaggctggagtgcaatggcatcatgtcggcccactgcaacctctgtctcctgggttcaagcaattctcctgcctcagcctcccgagcagctgggattacaggcacccaccaccatgccaggctagtttttatatttttagtagagacggggtttcaccatgttggccaggctggtctcaaactcctgacctccggtgatccacccatctcggcgccccaagatgggattatagggatgagctaccatgcctagcctactttagtttttaagtagatttaatgaaatctatttagtagccaaaagccaagaatgccaatagttttacctggctactctctgaaacaatggtattaaaaagggtctttccagcccctttccagcagaaagacaggtgctaagaaacagtggaagtgtgaaggtgggggaagggagagaaacagtttttatatacctaaactaacccagctgcatgtaaaccagtaactactcatcaaaataaaatacagaaagcatattagttttggtttggtgtgaaccagccttaaatacaaagttgttacactgaatgggtttaattgaccaaaatgcgtagggaaggcagaaaggattaggatgcccttctactcagctttatctgctgtcaagtctggttcctcaggggacacatggatcccctccattgtcctgcagattctgccaggccaaggctgttaaatctggcggggtctcatgtgtggacttctgggtgtatacagggagaaactagagaaaggccgagcagatttttactgcatgtaggtaatctacgtgggcttttagagaaaaaaggctttagataaaaagtgtttgacaaagtcacacatggtttgtaaaaaaacaaaaaataaaatacaacttgaaaactcttggagaagtgacactttagtttcccaaatcactcttcttcatacacttccacttagctttttttcaccttctagctctgtggtcttagaaggacatgcacttaaaataatttgtttccataggaatccaacaagtaaaagcataaacaacatcaaataaactacatcattagcatagaagcatgtcaaagaaactgagattagattttgagttttggcacaagtattagagaaatagagaaaagatttaaaagatagaataagacttacacaagaaagcaggacagcaatacgacaattgaacctatcatagaataataggttgtgataatggatggtgagaagaaatgcattggacagacatgcatgggcatgattgatttgagcaatttagcatggatcaagacaaaatctttaggatttaaagggctgtgagctgggtagtaaaaagccccattttagcacctcttggggctgtagatggaaagaacttggatttaaaactattttcaataagtgtctgctaagtgctaagtattatagctataaggatacctaaattaatagaagcacatattatctgttggatatattctaaatcttttaccttgtttaaattgtaaaccgacctatgaggtagaacctattattgtcacagcattgcgggtatagaaaaggaggcaaaggggggttaagttactttactaatgtcacacaacatgtaagcggtaaagctccatccccaaccccaagggtttgacttcagggcctgccaagacaacatctggactgttgcatggatcttgcctggctgtacatgaagctctaattccaggatggatgaagattccattagaacttggagtagcattaataaaattgcttccttgagaccaggcgaagtgtccagaaagcaaaggagtttaactgcttaaaggaaaggtgcagatttgtaggaaatgaagctctggactgtgaacagagtttttcaaaacaattaaggagaagagaaattgagtctagtttgatagatgtgttgtgcagagtgagtgtagtggagattagagaatcagccaaggaattatcccctgccttcatggatggcatcaacatctgtcttcatggcaattgtattggcagcctgagtgtcagagcctgggtcctgcccatccatgcagctgtggtcacctttgcacctgcagtgctggagttacttgagtgttactctttgaggtagcttcaggacacttggtaaaaatcactaagtggcaagtgaaaggcttggaagaaaagttctaatcagctcttcattcccacctgatgcaatttttgctgctgctgggaccccaagttctttgtctcctccccgccgcttttttttttttttttttttttttgagacagagttttgcttttgtttcccaggctggagtacagtggtgtgatctcggctcactgcaacctctgcctcctgggttcaagtgattctcctgcctcagcctcccaagtagctgggattacaagtgtgtacccccacgcctggctaattttgtatttttagtagagatggggtttcaccatgttggtcaggctgatttcaaactcctgacttcaggtgatccacccaccttggcctcccaaagtactgagattataggtgtgagccatcgcgcctgaccccttgcctcttttgtaaatagaaatcaacaccaggccaaacagaaattgtctcaggcaaggtttaataggtttgtggcaagagcaaagcaagggagcagcctatgggtaagagatcctggtggctattccttgaagtgcccagctcttaccattttaaggaagctgaggcggaaaaaggaatgacatacaagcatggttaggcaaagttttctttgcatttgtgcagtggagcgtcatgctctaacatatataacatggtgaggaaatggaggataagccctgccttgggtggatattttagtattacaatgagattataatgaggaaaaatcagtgaaaggtcagttctggggaccatcccaccttcagctggctagatctcatttggtgctttggggaaatgccagctctatcagcaaccttggaagatggtcaggttcttatcaggaatgttagagttccactttagaaaccttgggaggctgggcacagtggctcacgcctataatcccagcactttgggaggctgaggagggcagatcactggaggtcagcagtttgagaccagcctggccaacatggtgaaacgctgtctctactaaaagtacaaaacatagccgggcatggtggtgtgcacctgtagtcctagctactctggaggttgaggcaggagaatcgcttgaacctggaaggcataggttgcagtgagtgtagatcgtgccactgcactgcatcctgagtgacagagtgagactctatctgaagaaaaaaaaaaaatgaaatcttgagatactcaggccctatcattttcctacagcaagcgaggagttgccattcaaaagaggcacaactggtggccacttcaggaaacttttgcatccaaaagctgagtctggtgcacctagtgacattgccacagactccagtcagcatgcatagaaatagtggatacctggatttccatcgagcaagcaggctctaaaggtcttaaataaatgccttggacatgtatagttgtatagattccaaggctaccgttgcaaagggctccattcaaagttggcaactttgttcatgattttgactaaggtgaccaaaaaaaaaaaaaaaaaaaaaagactcagggggacagtgcaactaggtgagaacccagtggctttcctgagcttatttgtcttgcatttttgttgacatggattgttgttcacattgtcttcctctggcaggtccacctggaaagcattatatatttagcaagaaaaaaggaggctgtgaatgatgtcactgcggactgcgtatattccctgttgcaaatgtcagatccatgaagcataaagtgattaactagaagatattaaattccttacaaattgttgaaaagccttaaagaacaggctccagtcaaagcctctagaacaattccaagaatcatactgctggcacaggctggggaggagctcctactgcttgagacattcaagctgtcttttgcagcagaaaagagaccagctcttctcactactgcccccaggaggacagcagctctgctatcaactctcaactgctggaaatctgacccctttctctgactgcccatcagatgtgtcactacagagtcgttttggattgagatgagggaggggaaatgtctgatttcactcaaatgtgctcattttcctggtctgggtctcagccaggcagcacagtcctgtgggcacaatatcttcacttgccaggttcctataaaatgagagtatctttcttgactgtggaaaatatggaggcgaggagggtcaagcaatagcaaaaggagtacttggagttgcctgagcttccactctggtttccccaaatgttttcaatccatttaattcatgataataaacacctttctgcctaaccagccataatcgcttttcttagatccaaatgattcagtgataaaagtaaagagaaaaaataaatacacttttcaacgttgaagctgaccaggtgtctgcctctggtgtttacccctccacatcccactatgcatttcatcttccctttgcctcactggagatccaagtgcaagtaatgcttcacatgactgtgatccctagaacttcatcctgatgactgttgaaatcttctctgagttttaccagtggaaatggcaataaatagaaagattccagaaggtcccctagggtccatattttctgtacttcctctctaaaatatgtaaaatcagttatttttgctcttgctttatatgggctagatctatggccccagcacacatctgaatgccctgtgttgacaacttatccagtattgtattaagtctaaatggtgacatgcttatcatatcatttcttccaatttcttggaataattgtcatgtcaattctttgcattaagaaccatcagccagaaaaccacagccctgagaaaatagaaatagagtatttcaagctgttcagttggcacaagaatgatgaatctgcagctcattttcaagatataaatattctgtttatggaagtaacagcaccattcatgattagtgtttcagagcctccaccacttctgacagcatagcaattcaatagcacaagggtttgtgtgacagctttgcttgactaataatgggtttttccctgtctatagggaaagctgcacctgtgcacatgacaagagcatgagctacattttgcttcactttttttgaggcaaataagttgcttgatccaaagccatattatggaagaacttcctgactctgatgaaaactccttgaaaatccacaaataatattttatgcagaaacataaccgaaaaggaaggcaaatccatatatagtaaaataaccactgccatcctcatgttccatgaggtccactagaatcacctgataccagtaattagtctgagccctgatgtgtggtacaatgttaagggttctggaggggtcagttttcttggcaaattgggtgttcagaagagccagtagccctgtacatctcagttagttgaaagtcatattattgagtctccacagggacctccataacactggttcgtgaggctagctgggaaagctggaagaggtaactgaagtccatatgttgaatcatcctcattattaaaagccccctggtcgttaatggcatttcaattaatattcacttggaaagcttcttattcttgattatggctcatttttgaaacttctagtcatagctcttacagaatgactttgtctgaaatcatcctgttgcatttcttttaaggcctgatgatctgtcaaaaccaacagccaatattattaaactgctgttctctttgcaacgtgatcatcagatgtaggccttgcagtttacccactgttatgagttttacatttccagggcttccttgacaatggcactgatgtgactccatccagcatccattgttgtgagaactctatttggaatatcatcattgtgggcatgaacataatggagacttttataggatgcaatggttaatattcaacattattcaaaatttgctctagccttacccttggagctctactggattggaaaaatattttaggtaaggacaaccatttggtaaagttttaaaaataaaggctacaaataaattttctgtagcaagagtatgaattaggtgtcatcacaaataccattttttttgtgtggaatgtaacaattatttaaatgtatataatttagataatattttataaataaaatatgtatatattgcatatataatagaataaatgtacttaaatatgaatactgtacgtagttgtagccaacattttatcaaataaatatatattcacttctatgtatcttaaatatatatgcacttttttccataaagaaggtaaattttaattttttattgaaatactaattagttttaattttgtgtttttctcttaataacttcataatttgattactaaatattcatatttataccaccaattcaagaaaaaatatgtatgtttatataggtagaggtgtaaatactgtatcaggaagtgtttatgcattaattacggtaactggttaaatgtacaactcagtggctgataacagtaaacatttgttttcatgttcatagatgctcatgttcacaatcatctggctgatcaaggaaggtctctgctgagtggctcctctcagcagagaggagcctgtagattgtattcagcctgtagatatcagttgtttaacgacaaggctgaacagcagtgactacacatgacacaagattcttgtggcaggtcacagtagtgatcaacatcccaaaccaaaccgcacagttgaatttaagtccaataatttctaacatagcttcaaacatttaaaatatattcctttatttcaatgagtataagtttttaagaaaatgtttactccacttaattgtagaggtgtttgatcattccatagacaaataatcatgttttcaaccttcacaatcctgaaaatatttgcaaatgtaagtttgcattaataagaaaacaaagctggatgtgttttcaacatgtggcttcaaatataatttttttaaatgacctttttgggggaaaatcattttaacttatggaaatatccctctttacctctcatgtcctatagggttgcccaataagagggtcccccatgagatttggaagtgagaaaaggaagactcagtattatccattggtacctaagaggcagagagacaaaggtgaggactggagaaacacctggaaagatgctctaggaagcgagaacttcagcaattccagacttaaacttccagacaggactgaggaccacatgggtagaaaacccttacttcaggggtggatacattctgttttcagtgggagcaccaaagaatgctgcttctaatatcaactttcctgaatactatatccttggttttgaaaggttgtagtgtgaatgttaatcataggaattgggtcattcttgtcataccaaacagagccatgaaaccagaggggaaaggcactcagggtgaaaaatattgtttctagaatgcaattgaaataggccctattatgccatggaactaatgtttatggttttttgaataaacatagaaattgacttccccgatcttaaaactcaagatagttacatctgtcttacctgagttcttttttcagtaaaccaaccatcaggcctcccagatactatcaaggagctgaaacttacatatcactgaatcaggacagtgggacatcagacccttcactcattatgactgcataactgacctcctgcttcttgttgaccaaattatctcccttaaccctccataattcctgttttcccacatttcttccgtgctatataaacccctaatttttgttggtcagggagatacatttgagaatggtgtcccatctcctcagctacagcacctgattaaagccttttccttggcaatacttgccttagtgattggctttctgtgtggtgagctgcaggatctacgctgaatccctggtatttcagtaacaaaacactctgcaaccttcactgctttggcttcttgtaacctgaaatcaaatttgtccacaacttctgagataacttgatataattctaggattcactttgtccaccactgcttcccagtctgagcttgccagctcccaacccttcctagtgccaatgaactttctcaaagagccataggtaatattttccctttttcatgaaacactaactttttctttgttcttgccacatattgaagaccactgagttttcctgtatgccccatttgggaaatatttctgtgtaaataaaacattacatttagagattcatctctacattttatttagacgtcagtagtttactttaattctctgtattaagacaattcctgcctagaatatctatagtggcttcttctctgttatataaagtccaactgaagccataaactagactcctcaggtgtcatgatctctgtctgtattaaattaggagaggcattgctatgtctgtgtagttggggctgagaaagagaaaagaattagggtgcagaggtgacttcatgtccccttctaccaacaccatcagagtgtggctgcatctgaggaacaatctcagctgatggaggcatcaggaggagcagctggggcagcccagcctcacacatctgcttccctgggggtttatgttcgggtgtgtaacactgtgggagggtaactattatgctgtagacagtaataagttgcaaaatcttcaggctgcaggctgctgattgtgagagtgaattctgtcccagatccactgccgctgaaccttgatgggaccccactttgcaaactggatgcagcatagatcaggcgcttaggggctttccctggtttctgctgataccagcctaaatcatttctaatgccctgacttgcccggcaagtgatggtgactctgtctcctacagatgcagacagggaggatggagactgggtcatctggatgtcacacctggcacctgagattggaaacataaaaacaaatgtccacacaattaatcatgttgtaagagaatttccctgaacagtaaagcagtactgagcactctgggctgagtaaactgctagtgttctccatccttacctgggaaccagagcagcaggagccccaggagctgagcggggaccctcatgtccatgctgtgtcctgagtgggactgattcctgcatgaagtgtgtccagcctattaataaggcttcagggcaggaggctgtgctctgggaacatgcaaatgagcaggggatggggcaggctgggcgcagctgcagggctggctcatctcagtaactcagcagcagctcagtgtccccaggtgtcccaggtaagatcagggtagcacagatttgtctgcagagaatgggtttctactggagactattttgttacgagagacattttttagattttttttgacaatttgaaatattcctcaggagtcggtggagtatcatatttcattggcgtatggggagtatataggaggatattctttttttgtaggaaacacatagtaaagttttagacgatagaattctaaggtctttaaaagactattgtataattccggttagggaagggggtatttattgtatacttgcaacttttctgtaagtttatcattgttcctttctaaaaaaaattaaaaataaaatatattgacatgatgatgcatatatttgtaagtatatgcagctagagagaaaaaacagatcacctacaaagggaagccatcagactaacagaagacctctcagcagaagagattgggggcctatatttaacattcttaaagaaaataaattccaactaagaatttcatatttggacaaactaagcttcggaagcaaaggagaaataagatccttttcagacaagcaaatgctcaggaaatttgttaccaccagacctgcctaacacaagcttctggaagaagcactaaatatggaaatgaaacaccgttatcagccactataaaaacacactgaagtacacagaccagtgacattataaagcaaccacacaaacaagttggcaaaataacaggctaacagcatgatggtggtatcaaatctaacatatcaatattaaccttgaatgtcaacaggctaaacgccccacttaaaagacacagggtggcaagctggataaagaagcaagaccaaatgttatgctgccttaaggagacccatctcacatgcaatgaagcccatggactcatataaagggatggagaaaaatctaccaagcaaatggaaaacagaaaaaaaccaggattttaattctaattcagatgaaacagactttaagtcaacaaaaatcaaaaagacaaagaagggcattacataacagtaaagggttcaattcaccaagaagatctagttactctaaatctatatgctgccagctcaagatcacctagattcataaagaaagttcttagacactttgaaggagacttagattcccacacaataatagtgggagatttcaacaccccactgacagtattatacagattataatctgtataattaattttctgaggcagaaaattaacaaaggtattcaggacttggactcaaccctggatcaaatggaccttatataaatctgcagaactcttcaccccaaaacaacagaatatacatattctcatcaccacatggcacatatgctaaaattgaccacacaatcggacatacatcaatattcagcaagtgcaaaagaaccaaaatcatgccaacctctctcggaccacagcaaaatgaatgtagaattcaagactaagaaaatcactcaaaaccatggaaattaaacaacatgctcctgaatgacttgggtaaataatgaagttaaggcagaaatcaaaacgttctttgaaatgaatgagaacaaagatacaatataccagaatctctgggacacaggttaggcagtgttaagagggaaatttatagcactaaatgcccacatcagaaagttatacctcagattaacagcctaatatcacaactaaaagaactagagaagcaagggaaaaccaattccaaatctagcagaaaacaagaaataaccaaaatcagagttgaactgaagtagataagacacacaaaaaaattcaaaagatcaatgaagccagtgcctgtttttattttgaaaaagctaatgagataaatagaccactagctagactaataaagaagaaaagggtgagtatccaaatacataaaattagaagtgacaaaaggacattatcactgaccccacagaaatacaactaaccatcagagactactatgaacacctctatgcacaataactagaaaatctagaagaaatagataaattcctggatgcatacaccctcccaagactgaaccagaaagaaattgagtccctgaagtgagcaaaaatgagcttgtaattgaatcagtaataaatagcctaccaaccaaaaaaatcccaggtccaaatggattcacaactgaattaattccgcggatccttctatagtgtcacctaaatgtcgacggccag

SEQ ID NO: 7 - DNA, 312376 bp, synthetic construct
  misc_feature 1..312376: note = FIG. 1C
  source 1..312376: mol_type = other DNA
taatgtggtgactagactagcctagtgggattcccattaggctcatcatactgtgattgaacagtgctggtctgcacctcttcaggttaacaggggctgtggagtgacctggtgcaggaaatatcatctccatccataggatatcagtgtgaacccagggagaggcactggtgcaagagagatgagaacaggggtgtggagtaggggactgagccttcactttgagccgaagaagtttcctttcctatcctcaatcctgaacaagagggatttctggacttctttttgttttcaagtttgtgccccttcagatttggggctgtctggaatcctgccaggggacaccgagaaaaaataggagtctcacactgactgttgtatttcatctgctggggccatcccaaaccactgcgtacaatttcctttcctggtgctcaaatagctgctccacgcacttgttgtggtttcagagatgaatctgggtgggaagacaggacagtgtatgttataatatttaaatggaacccaaatccattaatatttattttaatatggaacattaaaagagttttgtaataggcaatgggaaaaggtaaaaaagataaaagctttttgagaaaaaaaacaaaaacaaacttatagaatgtctatgtgtcttcagtgttgcagggttgagagagatcagctttatggtgccccatggatgtgctgagatggggaaaatcaagaaagaaggaagtatgtaccactgtgactcaacaaataaatcaaagtaaaatggacttaaatctttcaataagtcattcacaataaatatcactctggtgcacacagaaatgcctgttagcaaactttcccttccccctggccatgtctccatggatcacctgtgtgcagagtggctccggtcagtgctctgtgttccctccacagggctccccacaacatgtgccctgtgtggatgtgggtgcatcgcctggggtggctgatgtgctccagggattcgatgctgcagatgcctcagcaccaagggtgggggtgggaatgggacaaggctgcagctggggagaccaaggatcaaccacacacagcaggggtttccacggggtgagcagcctcatttcctgacagtagagcgagcctaaaggtaggtgccaggcagtggtatctgtggggtggcccaggcctggagggtcacagagacacaggcaccacacagcagagacactgagggccaggagctcactcaggtgagggacttcagcagatctttctctcctggtacaaagagatcaagttcctaccatcagaatagacaaacaaggactttaatctcctcagctgagccccactgtccagggaagaagtctctgagcccaggcccaggtgagagtgggatgaggagaggagccaggacacagattttcatggatgccccgccctcctctgaggcagagcggataagacagggctgggggcatacccagtgcttgagtctcaggaggcagcgctctcgggacgtctccaccatggcctgggctctgctcctcctcaccctcctcactcagggcacaggtgatgcctccaggaaaggggcctcagggacctctgggctgattcttagtctcctgctcctcaggctcacctgggcccagcactgactcactagagtgtgttttttcctttttccgggctctcgggctcagtctgccctgactcagcctcactcagtacccgggtctcctggacagtcggtcaccatctcctgcactggaaccagcagtgacgttgggcattataactatgtctcctggtgccagcagcacccaggcacatgatttatgaagtcagttataggctctctggagtctctgatcacttctctggctcccagctctggcaacatggcctccatgaccatctctgggctccaggctgaggacgaggctgattattactgcagttcatatacaagcagcaacattttccacagtggacataagattgattctcaggctccaagtctggccagtgagcttctttgagactccctgggatcccagcagtgacactgatcactattgctgtcccacacatcccaagtgatgaggaagtaagaccaaaaccctcctgagattcctgacttgtgtcctgacaccagggctgttgggattcctgtctttccttcaagattgttcaaataagcagtgacagtcacttccatgtgagatatgagaagaagaataattccatatgaaccaaatccacgaagcctacactgaagcctgccaagttctctgcagtccagcgcgatgaagggagcattttcgtgggaacttttgggaatatgaggggagccaggctcagctatgggttccagagacaaagctcctggatgtttctccccggccttggtccatcacctgctacctctcctcactctttccacagacactgccccaggctaagcccccacaggaccctaagcctattcctgaccctgagctcagcccaggtgatgcttcaggagatgggatcctgagaatgagccccaacatctctttaacctaaggtgtggggtcatgagacacctgttagccataagacacctgtcccccacctgctcaggagacagtggagcaggcaacagtgcagagagaaccagcaggagccaggccaggccctgcatccaaagcaggccccagtccccacagattctccagctctagcctgtggtacagcccccactttctgcaggctgaaatgggcttctcaggatgggcaggccatgatgggggatggcagtgtgtccacaggacacagccctgctgcctgcctgaccctcatgccccctccttccccaccctggttaatctccaccagaaagggcccaggttcagaactcaggacacctggatcagctcctggacttgcccccactgctctctgttctcctgagccacttagtctcttttggcctcagtgttacctgctgtgaagtgaggaggcttatactgaactgaggaagctcttttcttcattcaaaattaaaagacagaaaaacaatgaaagtcatgtaaattaaagcctgctgaggggatgtcatttaatgggcttcagtgggtttcagacgtggaacttcttgtcttttctctgcagggattccaagacaggggctcaaaagagcttgctttctgtatggtgggaacagcggtccctagctgagaataagcaggagattcccagcttcatcaggaaggcagactaggctagtgtagaaatcctctccgtacaaactctgagaggtgttgaataaaataaagataaacataatttcatgttttcatggtgccgatgatggtgatgttagctcacaactaagctgcagtgcctggaacatcaggaaatcacagtgaatcacagctgctcttattgggtgggaggtgcaccagtttgatgcctaagtacatagaaagcctgggtccctgtaggatggcacatgcatctctctggactttgaaagctttgcagaagagcttcagttgactcactctaattagtccggactgaacaaaaccactagaggagggcatttcaaccctgagacacttctatagccccaacttcctaccctgcgtgtgcgaactctctgtgctgggctgggcagggcagattgggtcaccctgcacagaatggggctggactgtctggtcctcaacttctgaggtgacaggtgctgtggaggcacgtggaagaaaaaagctcctgggctgagtctcctccaccagctgggggcagcagagctgcagccaggagcagtcaggattaaggctggggctgcccagctggggcaaagagaaggccagcctggcgttcaacaggtgtccaagaatcagtcttcagactgaaagtgagtgcagttcatcctatcccctcaggctgcagtgaccattctctgagggtcagactcatacagtgtcaccccaggacactgacagaagcccggcacagtgaaggcctcacctgggaaatgcagctggaggaggctgggaccaggtgtcaactggggcagcttactcaggaaggggatttctttggagacatcccaaggttgaggtgctctaggagggggcacagcgtgaggtgacggggctcccagggcccgggttcttcacccaggatggctgtctgagcctcctgccactctcagggccttgtccctctcagtccagcagcaacctggggagctgagccctctgtcctgggcacttccagatacaccatacctcacttccttctgcctcaccttccagctccaggcggactctgactcagggggaaactcctgtgctcaggggagtctcgggtgggtggggtgaagcatttgggatcctgatcccttcatggggcatccccagcatccttaaggagacactcttcagagggacagggcttctcacctgcctcagctctgaccatggggctgtccacactcagtgacaggacactgaccagggatctgactggagtgaccaggaacctggctggggcaaccagggaccacccaccctctggagctcacatgctgtgcagagaccatgaccctgggaccccttcagagaccatggggcctgaagttagattttcagtccagtgtggttttctcctgctttttgcaagtttacataaaacattgatgagaaaaacatacataaataacagacgagctgagggtgccaattgctaatctcttgtggcaatgaggggtgatgtagcaggagcagcaccatggctgaaatgagaccagaggccctgttgactccacaggggtgtgtggttgcttaaatgacccaactattcccactgaataatcagcaagtgtcccaatgacacagcacagcatttagatgaaatgaacaagaggggactgagtctgagggaccagggggaggaagatcatgggtccctgggccacctgctgctgagtcaggtgtcagcaagatctctccgcagagcccagctcagcccatggccaacctcctggaaggtccacagctctgctgagcctggcccaggacagaccccaggtcagcgaggtttgggacagtggtcatgagattaattcccagaaaggtgactgtgatcacagggcttgaaggctgcagctgattttctaatctgagaccctgcttcttcctcctgttgcctgtgctgccctcacagctggtttgagtgacatctctccaggaggaatcgcagaggatgtaaatttgcataaacgccaaacactgactgcccccaaaagctggagagggaataagagaggcctggggagcccagctgtgctgtaggctcaggaggcagagctctgaatgtctcaccatggcctggatccctctcctgctccccctcctcattctctgcacaggtgctgcccctaggctcagtctccacagaccccaagttgagcctgacctgaatcctgagcaaagccctgccactgcctctgggggggattcctggcaatgcgtcctttgtcctcaagccccctctcctgtcttttcttgcagtctctgtggcctcctatgagctgacacagccatcctcagtgtcagtgtctccgggacagacagccaggatcacctgctcaggagatgtactggcaaaaaaatatgctcggtggttccagcagaagccaggccaggcccctgtgctggtgatttataaagacagtgagcggccctcagggatccctgagcgattctccggctccagctcagggaccacagtcaccttgaccatcagcggggcccaggttgaggatgaggctgactattactgttactctgcggctgacaacaatctcacagtgacacaggcagatggagaaatgagacacaaaccccttgccatctgtgtcaccttcttcctccagccccaggaggactgtggacaaagccacgaacaggtctggcccagtacacccagatcagagactctgaggcctccttccttccagatctctacggaggccctacagaaggtggatcaataataaattcggggttggcaggtccagtaggtcctggtgttttctgggctggagtgtgacttggggaaaaatgacttgaatggaagtacagtcagtgggagacatctattgagtggtgatggtcccagtatttccttgtgtggtgactgaacctagggcagtgccactactctgtggcccaaatgccctgggttattcctctgagttccccgtgtattattgagatgctccagcccccactctcatggtatcctgatctgaagaatcatggccagtgcccattgcagtgtctccatctaggtgccattttcaggactcatgcatccagcatccaaacaaggctgtgtgggagaccgtgacttgtcacagctgttccccactggaaaatgccactgagctgcagagaactgctctcccagtgatgttcccccttcacagtgtggttcaggtgcaatgcctgcctggtccctagattttaatgccatgttttcatttaaaataaccacgaagtgtctcttgctgagcgctccggtgtaacacattcccagtcatgcctctcacaattttctttctgacaaaatttcctgaaaccctattgcaatgaattctccctctcagagtaggattgcagggagttcacaaattaacaaacaaaccaaatactgtctagaagaaagaggatcaaagaggagagagctgcacagggagcgcactctggagtctgcagatattcatgagcaccgatgagcatgtgcatgggaggaaaccttctgtgatagagaaaataaccattcaaagacatttgaggaaacactccatagagctcacacacacatccatgtgcacacacatgcacaatcagaatagtgcctgttcctccgctccatgaagaaaggcccgagttaaagtgggtgagatttaccagtgagaagagctttgcctcagtactggggaaaacattgccctagacaaaaggcatctctggtgttaactaagaaagtgtacggcccctgtgctgatgcccatgtcaaagaccatcacacgtattttaaccaactagcccagagttgtcaccaagagtttgatcttacaataattctgcaatgaacatccctattcagactccttggagttcacctatgaagattaccatagaataaatctctagaagttgaattgttaggtcaaaaagaagtacgtttgtaattttcactgattattctcagattcctattcacgggggggttgtaccaatttacagtgccagccataaatctttgacgtgagtatgctgttgaaagtttgggtttttgccaacatggtagattaaaattttgttgtcttgtaacagtgttattttggatttctcctattctgcttgaggttgaacattttctcaaacatttcagggctcttatattttaggatttagtgagcttttttctaaaatggccaggtaaggagggttttagcccctgtgggccaagagtcaactttgaccatattatgagggaacttataactccagttacaatgtaaccatttaaagctataaaaaccactctcagctctgggaccacacaaaacaggtggcaggccaggggtggccacaggatgtggtttaatggtccctgttttgtagggtcatttgaagtttaaaaatttcaccagcatatattttaggtggagatctttttgtgggtaatactgtatttcaccgcctatagtggcctgagatttctctctagataagaacacacttttcttattttttggatggattttgggtctatctgtgatagccctgtgtcataaactcataacttttgtgtccgtccttttactgtgatttttgggagtgtgacagtatatcaggaatacactatccagggtggaaaatcagagagagggggaggagcaagtgggcaaggaagcttgtaccaaagctggaatatccactgcagcaggctcagagaaaagggtcctaatatcagcatttgactgaagccaaaaccacaagagaccatagaggttctgaggatgacaaataaaaacatagtttaagttttaatgcattcattatttttataatccacaaaaattctaaaactcagaatttaacaatgggataaggaaaagagtttgagatgttaaacgataaagaccccaaggaaagttgccaggaaaagaacaggacctttttggtggaactatgtttatgctgtaaattaccctcttctatatgtctatatatatatttaggtataagagaacatctcatggaacacccttcttcaccacagtcaaagatcaccctcacccaaggagggaaccgaaagggaacgtcaatatgagacagaaaacataatgcacttttgtataaacattaggagagtctctatttgcatatcaaatgtggatgcttaatgttaacattggaaatagtaggttaatatgcatgtgaggtgagttttcttttgactatttctgtctgtgatttatctttcttaatagggacatttctgcccttagaacaacttaacttgtgatattttttgttctattatctgtatcagctctgttttttttttttcaaacagtggcaaagatatcccatgactaatgattaataaattcaattaatgggtatttaaattatttcaagagtggacagttgtgacttccccacatctaactcacagatgtcgctgatgctgactcactcttctcttccaatcatagcaaataaagtgggagctttgacttttctgaagacccagatgacaacaggagagaggaggtgaaaccccctaaagctgttatcctttaaaccctcaggaggaatcatcctggagaaacacccacacttgagttggattatacctaaatgagagtttggtcttagagttggtgctgagttagttcaggatttgggttgttgggatggagtgaatgcgctttacaagtgaaaaatacatgagtttttgggtccataggttggagagttcttggctgaattgtgtcccccagagttcatacaatgaagctctaatgcacggtgtgtgactgaatttggagagaatctttaaagaggtgattcagtgaaaatgaagtcatgagggtgggttcttatcgaatctgactggtgttctcgtgagaagagaaaatttgcacacacaaaaatgagacactcgagatgagcgtgcagaggaaagaccgtgtgaggactcagcaaggaggtagcgacccgcaagccaaggagagaggcctcagtgaaaaccaaacctataaacactttcatcttgactccccagcttcagaactgtgagaaaataagtgtctgctctttaggccagcaggtctttggtatctcattaaggtagcactagcaaatgaaaacaaaagggaccccaaagaccttggatgcgggaggaggaggagatggagcagggtgcaggaggtggggcagggaggggctggaagttcaggctctgaggtcatctcctgggtggaatcctgactccactcactgctgtctggggacttggggaaaaacaattaaccgcccaatattaattccatagtaaagatcgggccttgagcacaggattcctcatcttccttttttatatgatgaaagtcttcttgaggtcatgcttgtaaaacactcagcaatgtatctggcatacactatggtctcagaagtggttattatgaattttctagtgatatgtagaggatgacattggtcctgtgggcagagggggcactgtggaccttggtttgaggactctgaaagacaccaagtccgctggtagtgctcaagagcgaagagcatcacagatgcttcctcccaggccccttctattgggtaaaatttactctccactcctgacacccatctggtccttcttctgaccttagcacattatcagtttgaagacttaaggctcagggctcagatgggagctaggacaggcacactggggaatgaggagtagatttgcattcactgctcatcagagagcccacccaacaaggatacaagaataaaagaagtagatttgcatgaagagcctctccttcccatgataagagaggcctgaaggtccctccccagccatgggctcagagacagagctatgtggcatctccaccgtggcctggacccctcccttgctcaccctcctccgtctctgtgctgcctcccagggctcagcccccaaaggaccagagatcagactggccctgagcttcagctcagcacagggagtgatgcagagtgtggggctctgggaatgaccctcatcctcataattaactctcctgtcctctcttgtaggctctgtggcctcctccatgctgactcaggagccagtagggtctgtggccctgggacagtcagccagggtaacctgccagggagaaaacctaagaagccatggtacaaactggcaccagcagaagccaggctaggctcctgtgcaggtcatacatcgacaaaataaccagccctcagggctcccagaccaattctctggctccaagtcaggaacacagccaccctgaccatcactggggctcaggttgaacatgaagctgactattaccatcactcatgggacagcagtgctactcacctcacaatgacacagacagattgggaagtgagatctaaagaccttcactgtctgtgtcaccctcttcctccagccatagcaggactgtggagacagccatgagcagggctggcctgggtcacctgcatcgaagtcctccaagctgcccttccccccagctctccaggtagtctctgcagagaatgagtcaggataggatttggggctggcagaaccaggctgtcctgctgttatttggaatggatgtaccttggctcaagatgacctgagccatcttactggaaggacttactggaaggacggtaagagggagacagctcctgagtgctcatggtcactgaatttcctcctgtgtgttgactgaacccaatgcagtgcctctactctgtggcccaaataccctggattatttttctgaactgcccgtgtttaactgagaccctcaagccccagctttgtgcatcctgatgttctgaacatggaagcctttcacagtgtgcactgtgacatccctcagattcccgtttcaggacttatgcacccaccatcctcccagggctgcagggaggccctggcttctcacagctctccccaccagaaactgccatgcagtacagagaatagctttgctcaaagaattgcccatttcagagtatgtttcgggggcaatgactccctgatgccttaatctgaaagtcatgctttaatttaagaccctgaatatcaaattgaagtgccttctagctgaacactcaattgtaaaacattcccagtcacacactccacacttctttcctgagaatatatcctgaaaccctattgcatggaatcctccctctcagagtaggattccagggaacttaaaaattaaaaaaaaaaacaacacaccagtctagagggaaaaatattgaagaggagagagttagggagttgcacaaggaaagaactctgaagtctgcaaatatgcatgcactgaagagcacttgtgtgtaaagaaactccctctgaaagagaaagacccttgagggaacactccaaagagtgtgcatgcgtgcgcacacacacacacacacacacacactccagtcacagaggaaaggcctgagttacagagcatgaggtggactcatcagaagagcttcggctcagtattggggaaaatgtcggacagacatagggctactccactgtcaactaagaaagtgtagaagcaaactgggaaaagttaagacagtttccaagtaactttactgaatccaaaaataaaagaccaaaatagagaagaaaatgcaaaaggattataaactcaacaaagaaaaattcacaatgattggcattctgtcaatatttcttgcaagcaaaaaagaaaatatatgctttaacacagagaaaaatgaatcaatccaaagtggccaaaaattgcacacatgatagaccttgtaggcacgaattttggagcaattctttttttttttttttttttttttgatggagtctcactctgttgccaggctggagtacagtggcgcgatctcagctcactgcaacctccgccacccgagttcaagcgattctcctgcctcagcctcctgagtggctggaactacaggcatgtgccaccacacccagctattttttttttttaatttttagtagagacggggtttcaccgtattggccaggatggtctcgatctcttgacctcatgatccacccgccttggcctctcaaagtggtgagattacgggcgtgagccaccgcgccagccttggagcaattcttataactcttttctccttcctcatgagaatggaggatctattgaatgtgttaagtggagaaatggaaagcataaagcaagatgcaagttaaacttttagaaatggcccctaaatatctgcattgaaaaaatacactggatgagactcattgcagattagaagctgtgaaggaatagatgagtgaacttgaagatatggcaatggaagttatgcaagatgaagcacaaaaaaagtgaagagagcatcagtgagtttcaggacatcttcaagctgacttactggttataattaaagacatgaagggagataacattggtggggggagaggaaaggtagaaaagccatttaaaggaatcatggccacaatttcccaaatttggtgaaagctagaaacccactactccaaaaagcttaacaagtcacatacacacacacacacacaaacacacacacacaaataacacaccaccaacactcaccataatgaaattgctaaaaacctattataaagacatacttttaaaagtagccataaagacatggtatgtacagatgaacaacatcataaaaagaacagatttctttttctttttaaaattttcttaaacatctgtgggtacagagtaggtgtatatgtttgtgggatacatgagatattttgatacaggcattgccatgtgaaatagtcacatcatggagagttgggtttccatcccctcaagcatttatcctttgtgttacaaactactcaattacactatttcaggtattttaaattgtacaattaagttgctgacatgttatcaaatagtattgatgtaactctgacatgctatcaaatagtaggtcttattcattctttctattttatttacccattaagcatcccctaataagagcagatttcttcttagaagtcatgcaagcaggaggcagtggagctatatttataaaatattaaaagaaaaaacttactaccaaaacccatccacagactcaatgcaatccctatcaaaatacaaacgacattcacagtagtagaaaaaaactctatagttggtatggaaccacaaaatcccctgaatagccaaagcaataccaagcaaaaagcccaggctgaatatgtcacattatctgaatcaaaatatactacaaactacagtaaccaaaacaagatcgatggtattggcttaaaatcagacactgagactaatataatggaatagaataccccaaaataaattcatatatttacagccaactgatttgcagcaaaaatgccaaaaacatacgttgagaaaatgacatacttttcaataaatggcgctgagaaaaactggatattcataggcagaaccttgaaactagacttttatctctctccctatacaataatcaactcaaaatttattaaaactccgaaatataagacccaaaactataaaactactagaagggaacgtagagaacacaggggaagttcttcaggacgttggtctagacaaaaattccatagctaagacttcaaaagcacagggaacaacacgaactagacatatgggacttcattaaactgaaaatcttctgaaaagcaaaggaaacgatcaacagagtgaagacaacttctagaatgagagaaaatatttgcaaactattcaactcaaaagggcctaagatccagcataagaaaataagacaaggagctgaaataactcatcagcataaaaaacaaataatacaattaaaaagtggataaatgatatgaatagacttttcacagtcaaagacatacaaatggccaacaggtatatgacaaaatgctcaatatcactaatcatcaggggtacgcaaatccaaacctccatgagatatcatctcatcccagttggatggctatcatcaagaagacaaaaaaataacaaacactggtgaggatgtagagaaaatagaagacaaaaccacatggtcatctcaacagtcacatcaaatgttttcatgcgaggaaacattaccatttgttgtttttctagtcttgctagagcatcataaaaagataagatttgtggtgccactattggagaaaatgttattacatgcaaagactctggctatcccacaccaaactacatgaacacttactgttaaatgctaaaagaggccaggcacggtagctcacactcgtaatcccagcactttgggagaccgaggcaggcggatcacaaggtcaagagatccagaccatcctggtgaaaccccatctctacaaaaatacaaaaattacttgtatttttgcacggtggcacacacctgtagtcccagctactcgggaggctgaggcaggagaattgcttgaacccgggaggtggaggttgcagtgagccaagatcacgccactgtactccagcctggcgacagagtgagactcaggcaaaaaaaaaaaaaaaaacctaaaagattacaattctgcatttccaaatgttctggtggtcagagaccacttccttgacaagtggtgagtacggggatctgatgggataggtggcatttaggcaggtattgggtgaagaatagtgatatacacaagaaactttcaaagagaaaaacacacggaagttggaacacagaagagaacataatatgtctgagaaataaggaaagtccagactcactggagctgagtgagaacaagaaaaatggcataagccatgtatttctctctggatatctcatcaaaatattgtctcctccccaacacaccacccatgtgaattataaaaatgcccgtttttaatttttgtttgcatgtcgtgacagagtcaagcacgtgaatcaagctgagtttgatgagtccagggctgttaagctccagacccaggtggcctcagaaggacttggtggaacaagggcttgttgtcaaaagcagaggaagtgagattttccattgtggcttagaccagagattcttaaattccagtggacacacaaggccccttaaggatctggttaagatgcagatgcagcctcagcagttctggatgtggccccaaattctctgtgtccggcaactcccaggtgaggctgctgctgctggtcctcccaggaccacactttgagtggctgaactcttattcacccacctcactcaagccacgggtgagactcacacaaggagggcaccttctagaagcacaggtcacttctcactcctccccttgtgtcttagatcctttcctgttactataaagaagtacccaaggctgggtaatttatacagaaaataaaagttttatttggcagacagttccaatggctgcagagttcaaaatgtggcatctgctcttgttgaagacctcaggctgcttcctgtcatggtgaaaggtgaaggcgagccagtgtgtgctgaggtcaatgaggggaaggaagcaagagagaaagggaagataccagtctcatttaaataagcagctcttctggaaacagaggaaattcactcaccccaagtgagggcattaatctattcatgagagatccactcctatcaccctaaaagctcccattaattcccacccccaacactggggattcaatttcagcataagatttgcaagggatgaagatcaaagccatagcaccctgaggcttggccacacacttgctcatctccacatttgtcccttccttcaggaccgggatcctgactgctctgactcagtctccgtctacctcatggacacctggcagtcggtcatcatcggttttgctgaatcagcagcaacattgggggtaacaattgtgtctcctggttccaccagagacagagtagagacccacacagctgaagtgtggggtcaaatattaaaactaagagacataagattgattctcaggctccaagtctgacaagtgagcttctttgagactccctgggatcccagcagtgacactgatcactgttgctgttccacacatcccaagtgatgaggaagtaagaccaaaaccctcctgagattcctgacttgtgtcctgacaccaggtctgttcttccctcccctagaataaaacatctcttaagcacaaggctgaagaaatgtggcctcctcctttctcccacagctggtcaaagtggatacctgagagaattggctcactgaggcctcttgggaacaaaggctgggttcctgcctgtgatctgtgtactgagacacattccggacctgcccaggaaaggcaagtatagatgatgtttagttgtcacagagtccaagtagggacaattcagcggtgtcttcttgggacccctgcctctggctattttcatctactttataatgggccagggccattatttccaacttgtcatatcctttttctcctttcctcaccaggtaaggaggtggaggacagttgatgagggctggcttatgagttaccccaggatgcaaatgactttgaagtcaagcccatgtggggtcaagctcagtctataaccagggtcttttgagctctggaggagccaggcatcccagccatcaaagaggtcttgcatttgctaataaatcctcttcttccaacccacagcttatcttggctgcctaccctcatctctgtcaggaagcaatccttcgttgtttaacaccaaattattcttacttggtcagtttaaaagtcccttcctcagaaaggtcatctgtggcctgaagacaaagtgagaaggctttgctgcattttcatttggaaccttacattgccccttctgcaatgttctaaccacacatggcacatatttacaggacagcgtgataattcacttttgaaaatacagaatgtgctcatggaacaggacaatgtcatacttttggggcctgatgagcatgtccttttcacaggaccccccagagctgcccatgcatccagaaggtaccattctactctatgcaaaacgatggggcatttctatattgcagtttcttagggttccttagaaagaggccacccccaacacagagctgcacaccttgtgaccacttactgtcaattcctcaatgctgtctccaagtctcaccatgcacaagggaggaacacagagaccctggattcctagagacttgcatttcttggatgaacaaatctggggtttggttggtggcagagagctcagggctcatgtgtgagcatcacctgatgcttcctccagggtcagagtccagcccctaccctggaaggatgaaagatattgtccacagaagtggtataaaggtaacagcatcgaggacggagctgcctcttgaaatgggctattgctttgcacaacgctggagacctaaattatgttgactataatggaagagtagtccctgcggatggcctctaattgggtggaagaaagcagagggtctgcgtctgagagagcagcaatgggcagattcagcacaggcatgggcagagcagcaatcaagggtacctgagcagcaatggccccgggagaggcctggcacctgccggaagtgacgttggagacagagaaacatctaagacttaaggcttctctttctgtgcaatcccccaccccacagtttatgtgtcacagatattggcacctccttactgtaaggggtcatatgaataatacagtcctcaggggcatgggttcgaggggcagccaggtttatcctcgaagcccacttctgttacctgcagctgtgtggctgtaagcaaggcatttaatctctcagaaaaccatcctaatgagaggttaagaacctctgagaaaaaaacttagacaagaattgacagtaattcttcactattgaggctgcagggatgtaacttaatcatgtttgtaaagtgcataacacagaccctgacatgccccagctgctcctgagttggcagcaattattcctgacatcactcatgagaattggacctggaatggggatggagggaaggcagtgcagagggtttcagagggttaggaaaagagagactttaatgatttaaaatgaaggcctaggagtggagacaagcgtcctgggacattctcctgccaactctcacaatgtctcagagactgttccaaggtgaagtctactagagagctaagggaggagtttgcagaatcaaggtttgcaatgtcatgcatgagggggcagagagtcagcgggagggaagacagctgagctcatctgaagggtatttatggttttctggccctagagtccttggccatccctctatgaccagggcctcagataagcagagagcttatctgcttctctcctccaacgatagttcctggttatcctgagcccaggtcagtgcagctgtggcccattctctcctctttgtgctcagtggactgacctggaggaaacagtaggaggttcccctgctctctgtccccagggtcctttcctttcagtggcaccagcccagccctagtgtccatccatctgtgcctgcccagtcaggcctccatgctgccccctgtaatggccacaggtcaaaaactgattgtcagtcttgagcagattgtcctgactctttctgcaaaactgagcctctcacccagcaccaggacgtcacaagcaaggccagctgtaggaaggcaagtaggggagtaacgtgcatcacagagtctggacaagacaaagtagttctgctgggacacatcctggtgatgtttctcaggatggttcaggtccctgcaattgcaggcccagagaacaggactgaaggctggaagatgtgctccctttctcctgtacacaaaacagtgccatgtgtgcatgtgagtaaatgcatatgcctgtgtgcttgtgtgtgtgcacctgtgtaaatgcatatgcctgtatgtgagagagtgtgtgtgtaaatgcatatgatgtgtgtgagtgtgtgcatgtgtgtaaatgcatatgcctgtgtgtgtgcatgtgtgtaaatgcatatgctgtgtatgagtgtgtgtgcatgtgtgtaaacgcatatgcctgtgtgtgtgcatgtgcatgtgtgtaaatgcatacactgtgtgtgagtgtgtgtgcatgtgtgtaaatgcatatgcctgtgtgctggtgtgtgtgcatgtgtgtaaatccatatgcctgtgtgtgagtgtgtgtgcctgtgtgtaaatgcatatactgtgtgttggtgtgtgcatgtgtgtaaatgcatatgcctgtgtgtgtgtgtatgcatgcgtgtaaatgcatatgactgcgtgtgagtgtgtgtgcatgtgtgcaaatacatatgcctgtgtgctggtgagtatgcatgtgtgtaaatgcatatgcctgtgtgtgcatgtgtgtaaatgcatataccttgtgtgtgtgcacatgtgtaaatgcatatgcctgtgtgtgagagagtgtgtgtaaatgtgtgtgctgtgtgagtgtgtgcatgtgtgtaaatgcatatgcctgtgtgctggtgtgtgcacatgtgtgtaaatgcatatgctgtgtgctggtgtgtgtccatgtgtgtaaatgcatatgcctgtgtgtgagtgtgtgcatgtatgtaaatgcatatgctgtgtgtgtgtgtgcatgtgtgtaatgtatatgcctgtgtgtgtgcatgtgtttaaatgcatatgctatgtgtgtgtgcatgtgtgtgtgagtgtgtgtgcacgtgcatgtgtgtgtgcatgtgtgtaaatgcatatgctgtgtgactgtgtgtgcatgtgtgtaatgcatatacctgtgtgtgagtgcatgtgcatgtgtgcacatgtgcatgttagtgttgccagggagtgcttcaagtatcgaatgtcccaaattcacaacttttctattttcctcacttacctcctccctgacacatgcttctcagttaagtgagttcatatgcgcaaggcctacaaacaggcaaggcatgggccatagtcagtgctgagtcagtgtcatcaaatattgttatgcttatatagaaccttgtccagggtgggccaaatgtatgcccctgtcttgtcctgacagagcagcagaaagggagactgagacaaaacaatggccagggccctggcaacacggagacaccttcccactcctgtgagcttcacagacaaccctgggtatgggattcctgtcattcctttaagattgttcaaataaacagtgacaatcactctcatatgatatatgagaagaagaagaattccatataaaccaaacccatgacgcccacactgaagcctgccaagttctctccagtcgagcccaatggagggagcattttcatggggacttttgagagtatggagaagacctgaggaaaccaggctcagctgtgggctccagaggcaaagctctgggatgtctccccatggcctagacccttcgcctgccacctcttctcactctttgcacagatgcttcccccaggctaagcccccacaggaccctaatcctagtcctgaccctgagctcagcccaggtgatgcttcaggagatgggaccctgagaataagccctaaagtctcctcaacctgcaggctctgtagtctcttaaagactcaggtacctccagtagagttggccatgagacatctgtccctccaactgctcaggagcaggcaacagtgcagagagaaacagcagcccaggccaggccctacactcaaagcagcccccaatccccacagatcctccagcgctaacctggggtacaggccccacctctgcaggctgaggtgggctcctcagcatggctaggccatgacgggggatggcagtgtgtccatgggacacagccctgctgcctgcctggccctcatgccccgtccctccccaccctggttaagctctgccccaaagggcccaggttcataactcaggacacctggatcggctcttggacttgcccccactgttctctgttctcctgagccacttagtttcttttggccacagtgttacctgctgcgaagtgaggaggcttatactgaactgaagaagcacttttcttcattcaaaattaaaagatagaaaaacaatggaagtcatgcgaatggggggatgtcatttaatgggcttcagtgggcttcagacatggaatttcttgtctttcctctgcagagattccaagaaaaggactcgaaaagagcttgctttctatatggtgggaacagcagctgccagctaagaataagcaggagagtcccagtttcatcaggaaaacagactaggctagtatggaaatcctccctgcagaaactctgagaagtgtggaatgaaataaacataaacatgaaattaatctgccaacgatggtgatgttagctcacaactaagctgcagtgccagaaacatgcggtgattgcagtgaatcatagctgctcttactgggtgggaggtgcaccagtttgcttcctaagtgcatagaaagcctggcacgcacgtctctctggactttgaaagcttggcagaagagcttcagttgacttactctaattagtcctgacggaacaaaaccactagagtagggcatttcaaccctgagacacttctgtagcaattgctcctgccccacatccctgcactgcatgtgtgacctctctgtggtgggctgggcagggcagattgggccacactggcacagaatggggctggactctctggtcctcaacttctgaggtgacaggtgctgtggggtcacctggaaggaaaaagctcctgggctgagtctcctccaccagttgggggcagcagagctgcagccagcagcagtgaggagagaggctggggctgcccagccggggaaaagaggaaggcctgcctaaggttcaacaggtgtccaagaatcagtcttcagactgaaagtgaagacagttcatcctatcccctcaggctgcagtgaccacgctctgagggtcagactcatatagtgttactccaggacactgacagaagcctggcacagtgaaggcctcacctgggaaatgctgctggaggaggctgggcccaggtgtcagcttgggcagcttcctcaggaaggggattccctggaagaagtcccgaggtcaaggtgctctaggaggggcacagtgtgaggtgacggggttcccagggcctgggttcttcacccaggatggcggcctgagcctcctgccactctcagggccttgtcctgccctgtccagcagtgtcctggggagctgagccctctgtcgtgggcacttccagatacaccctgcctaccctccctctgcctttccttccagctccaggcagactctgactcaagggcagctcctgtgcttaggggagtctcaggtgggtggcgtgaagtatttggggccctggtccctgcatggggcatcaccagcctcattgaggagacactctccagagggatggggattctcacctgcctcaggccacagccctgaccccggacctgtccatgctcagtgacaggacaataaccaggaacctggctggagtaaccagggaccacccatcctctggagctcacatgctgtgcagagaccatgaccctgggaccctgggaccctgggaccctgggaccctggaaccgtgacagaatccatggggcctaaagttagattctcagtccactatggttttctgctgctttttgcaagtttacataaaacattgatgagaaaaacataaataaataacagacgagctgagggtgccaattgcttatctcttgtggcaatgagggaatggtatagaaggagcagcaccatggctgaaatgagaccagaggccctgttgactccacaggggtgtgtggttgcttaaatgacccaactattcccactgaataatcagcaagtgtcccaatgacacagcacagcatttagatgaaatgaacaagaggggactgagtctgagggaccagggggaggaagatcatgggtccctggtccacctgctgctgagtcaggtgtcagcatgatctctcggcagggcccagctcagccccatggccaaactcctggaaggtccacagctctgctgagcctggcccaggacagaccccaggtcaacgaggtttgggacagtggtcatgaagtcaattcccaagaaggtgactgcgatcacagggcttcaaggctgcagctgattttctaaccagagatcctgcttcttcttcttcctcttgtcgcctgtgctgcccccacagctggtttgggtgacatctctccaagaggagtcccagaggaagtaaatttgcataaacaccaaacactgactaccctaaaaagcctgagagagaataagagaggcctggggagcctagctgtgctgtgggtccaggaggcagaactctgggtgtctcaccatggcctggatccctctacttctccccctcttcactctctgcacaggtgctgtccccaggccctgctccaggccctgctccagtcttattccccacagatcccaagttgagcctgccctgaatcccgagcaaagcccagacgcagcctctgggtgcgactcctgggaatgggtcctttgtcttcaagccccctctcttgttcttccttgcaggctctgaggcctcctatgagctgacacagccaccctcggtgtcagtgtccccaggacagacggccaggatcacctgctctggagatgcattgccaaagcaatatgcttattggtaccagcagaagccaggccaggcccctgtgctggtgatatataaagacagtgagaggccctcagggatccctgagcgattctctggctccagctcagggacaacagtcacgttgaccatcagtggagtccaggcagaagatgaggctgactattactgtcaatcagcagacagcagtggtacttatcccacagtgacacaagcagacagggaagtgagacataaacccctccccctctatttcatcctcttcctcctgccccaggaggactgtggacaaagccatgagtaggcttggccaaattcacccaaatctgaacccccaggctgcccttccctccagccctccaggcaggcactgcagagtagtcagtctggagtggatttgtgcctggcaggccaggctgtcctgtgtttctttgcctggggtttgagttgtcgatggagggtctgactggaaagacagacacagggagacatccatgcaggcatgtccaaagggacatggggaactctcaggtctcagttgaatgcagtcattgttgtatcctctgggaaagcattcctctagtgcatctaagacctccagacccacagagcctgagatcaggaggagagaatgttaaatttttgctaatggaccactgaagacatttttgagtggagccactacaatttactccttgattctggactcatggatcctgactgtgggagaaacagcaccatctattgggcactgatgcacagaacatgccctatcctggaagacattgtccagccctacacatacttgccacttgcctggtgcagtaatggtgtctccaagcagtcattaaaccattcatataagccatatgtctcagaatgtttgggacaagagtaagaatcttgattgccagaagaaaaggcccatagccctttatttgcagtgaaatgaattccttggtcagaacctcctgtggaataccatcatgatgggtgcgtcattctgtaatccagagacaacagttttggcagaagcattgctgtcaatgaaagcaaatcctctgtagaataaatgtcaattctagtaagaaaaaagagctattcctgccatgatggaagagtgcaaacgaaattaatattaagcaggcccctggctgttttccacagagaaagtcatcctatagggatctctgtgttagtctctgctgttggcagatggtcactcagcagtggctacagccaggccagctccagttagtggaaatcgacattgatgagcccatggacagcctccatccctgccaccatgggcgcttttttttatggagcccactgggcattgacaagagtggttgagggaggctgcctgatgtccacagaacaagtcaccctactcacctgattagcaaaatcacttcattttcacagaagacttggtgagtattgacatatggaaaaaattctcttactttctgcccaccggaggaggtctattcacacatctctccccctgacgtatttgtgatcaatattctcattgtgtctctctcaagtccctgaacatccttgagcatctttcaagaccctgagtcacaacctgtgaattaggaacctctgcccatctcttggcaggtgacatgagccaattgcactgcttaaaattctactttaatgagaatgttcctccaacactgctgttcagggattctcagaggccaggtggagtactagcactgtccacaccagtagtggctgcatgtcctgcagaaaactctgtaaccccagcctaagtgcctcctcctaggcagctgatctcagggagcccctcaggacgtcaaggctgtagggtgagaggaagacatggtgcagggctccggtcatgtctatttggccaactcttcatgaaacttacttgggcctcgtgacctagtccctcaagtcacaaatacatccctgccatgtgattgaggagctgctggaaatggccaaccgggactgtggttcagaccaaacctagcatactggcaacttgggtcgcatggtgagctgtgtggccacaatcacacagagcctctgctgaggcccaggagcgttcgcagtctttctcaaatggagctttctgctcattcaaaaaaataagtagagggaggctgggaccccaggaccacttagaccacgcacatgatcttgtctgattattctgaatccttgcatgctcagctatgcattatggtaaccaagccacagtgtctttggcaataaaatgccactacttggcccccacctaacctgggatcccctcaaccacatcttgctacccaaaacaggtttcacctccactgagagaaatttatttttatattgagaagatgaaagattaattatttcaattgtgaaaattttataggacagtaatgtgaaaatattttaaaagacactttacgaagagtgaaagaccttccattaaaccactcaatatatgacactgtaattggcctacccaaaccctaagttcagctccgggttgggaccttctgggaatggacccttcatcctcacgccctcctctcctctcctctcctctcctctcctctcctctcctctcctctcctctcctctcctctcctctcctctcctctcctctcctcttctgtcagccctgtgcctcctatgtgcagagacagctggtctcagtgttggtggccctgggactgacaatcatgagcacatactctggagataaccttgagataaacatgcattaaggaaccagcagaatccaggccagtccatggtgctggtcatctagtataacagcaactgaccctcagggacatctgcccaattcttaggcttcaactcagggaacatggccaccatgaccattaatggagcccaagcccgggaagagactgactattgctgaactgcagataataacagtgggagcagctggcagggactcatagtaacacagagagacagggactagccacagaactgtcccatctcggcctggctctcattctcagctgccctgtgagcagctgaaggtcaggcctcagggtcaggcgtcctctctggtcttaacctggcccctgcagggctggtgattctgagcagcttctccatcctctcagggcctgcatgtgtccagtgagaagtgagtggacagggggaagctggttggagctgcaggaacctctgtcaggtttgtggtgtacatgaaaggtttaggaatccacacaacatcacatggccccagatgtaatcacacatcacacaggggaggaaagagctgtcgcagagggtacagtcctgtggaatttctcttttccttgggtataagcagcttagtggaagctccagaggctgtgtctcctctggtttccagatgagttcagttgacctccgcattctaaaggggtgcctgaggcctgaggaggactggagacccagccccttttggccccagggccctttctgtgctgacatttcacagaaactgaagaggaagaacagacactacctttcatcccacctggggactgtctttggggcacgctgaactcccatggcccccaaagtcccatcaccttccccaggtaggtcagacctgactggatgtccctctagtgccctgatagtgtggattttatctttgggctctgggctgctttctgaggagctcactaagaacccttgatgccaagtccaggacctgcccctctgctccatgtcccaggggctgcaagcatgacgggaaggtcctgctgggtgaggatggtgcccttttccagaagagatgtctgattccagtctctagggccaggtttgttgggctttttttctcacttggaaggtctcagtctctttattaccttctttaaaagtacaattggtttaatcgtgaaatcatgtgcatgcactaaagtttacagactatggtcatcagcacatatgtacactctttctggatgggacaactgtggacacggccatactggggtctctgtctctctcattatcacaagggaggataccaacagctctctcctatgcagaccgtagtcatgtttcccaattgcacaagaatgtctcttacagttgtttaatttccttcccagccaggacgcttaagtttcccatgctgatacttggttgctatttctctctgatccaacatttttcaaacagtattgcttgcaacccaaggcttatgaaacactttaccaaaagttccacaagaaaagctcaagtttctcatgcaccgttggaccaggttcattgcgtgcagtaggaccttgctcaagtgatgagtccatttgatgttttcaccatcaaggtgaagggtattatgacttttgggcactgagttgatagaaggaagacagcagctgatgatggccctgcccaccgatgtgtgtgtgtgggcaggacctatcgatggatttagaagttgagggaactgtttattctgcagatggaatttccagcactgaatctccaccaaccagacactagcactcagcaggtgctctgtaagaagaagcccttcactgccaatcacggccattacacaggtgaaggagaggatgatttttaacagccattgaccctcacagtaaactgaggtcaaaactctggtacacaaagtgactttgagagaacaggctgaggaagcaggttaattagtagcagaaggctttgccgagagcaggaacaaaacagggttggtgaggaactagtgatgccatggtgtggaaggaacaaggcctgtaccaggagcaggaaggggcatgggaaagaccacactgccacatgtgatgagtcagcacatggaaggcacagcaaatgttgcacaaaggtttttgtgtaataacctggcaaacagctgcttctctatcaagattgatgagtcaaaaaatgttactgatgcattgctgtcacatgtgaaggtgtgtgaagaatggtgacattcaaggaaacctgttctctgcagacacctacccaccagtacagcagacaccccagctatgccaagggctttgtcttcctctggggtaagagcctgggaacaacaagttggcccctgaaaggggtgccccatcatgcgctcttcatggctgagttaagtggggagctcccagagaactttccagtaaatggtcaatctgtttgttctgggtgcattgagcatgacccaggatcaatggaagtgacagaagcttaatttccccaaggctgcaaggcgggcactgggaggacggctgaagcagtttagccaccaccccctagtggctccagccccaggtaagcagggacagttgaagggcctgcctgagcccacctgtgtctaattagttccagcatcagcagctgcatcctgtagaccaccaaggagtgtgtgtgcccagcccctcacagatcacctgagcataaacaggaaattctccttcttacacctgactgcaccacacatctgccccttgctcttcatttacaagacgctatcacatcagacacggactgatctgagtcccgggttccctcaggtttctgctgtcctctcagatccccacacacaaaagactcttcaccacagggcgttgagccagctcttcccctaacactgcctcttacaggttactcttctccaatatgatgcgggtttgatttcagtgtttctacatatatacttttgtattttattgggtaagctgagccccttgtacctgatcttgagtcaggcaggggccacacagagaagaggtgttcctcccctgggaccagcagtcctcggatcagggcatcagggacctgaacagcaggttctgaatccacacctagacccaggaagtccctgagcccccagcccacagtgtggagcggccaccagggggaagcagagagttacctggcaaagccacctggcgatggggcgggcctgggtgacagggagacgctgacatgcagcaggagccagtgaccatgatctcacacctggaatgaaagggtctttattttcatagagtattgtccttgtgtacttgacactcatgtagaaattctagaataggattttaccttcagctcttgcagatgctgcctctttctctgccacagctccaggcacttgacttctcacagtgccctctcctcacacacccagttgtgctaaaatggtgtccctgccatgtgcagtgtcctccctgaggtcacaggtgtcccctttatctcccctttgctctgggagcccctgtcctgcagacacagtggcttctcctttcctggctgctcctccactttcattgtccctggtctttccggactctctcctggggaagctgccaaatcatggctcttgatttcctggtgagtcacaaaatagttgctcattaacctttagttgacttaagttcttaatcattgatacattttccccaacaactgacgacaacttagttataataaacattcacttctgggggtcttggagtttgcagccccctctcattctctcatggagcaaacatttccttcgcctcctcatctgtctctgatcctgacagcatcctggagatactgaggcacagcagctatgacctacccaggagcttgcagccaaggcagaaacttccatcacctcatggatcttccagcactctgtgtgcacttgacaaataagaaattccattgtcctctaccactcaggagctgtgccctgcggtgggacctgcacctttccaaggtgtgtgttatcatctgcacagtggagatgaagagggaacctgcattgggttctggaaagtaccatctaaaaatatatttagacctgcaacagaaatctcctctctaacataaaatatttatgatcaggacacactgagaggcctagaccaaaattaagcactgccctcctgagccaggatagaatggaggaggggactggggaccccagataattccacagttaccagcatgactctatgatcacctcctggaccagatcaaagatcatcccatatgaaggacttcatattccttaggaaatacaaagtcacctctgagctctgctgtgaccaagtgagcccaggaatgaggctgagcacagtgtgatgtggagatgtctgcagagaatatggaatcaattgataaaggagatcctgtgggcaaagggtgggagggcaaggccacccctaacctctttgggtcccttggggctgagtccttctggaaaccacaaagctcctccagcagcagcccctgactctgctgattggcatcacgggctgttctctccaacaaggggttaagagagacctgggaggagcctgcccagcctcagacttgagaagcagcattggaggcacttcagccatggcctggcccctcttttccttggtctcctgactcactgcccaggtgctgcccccagggtctcacccacctgcccagccccaggcctccaggttcagcctggccatcagtctgagctcagcagggccctgtgtgtggtgggcaggatgctcgtgaccctgctgcagggggaggggctggttgggctgaaatgcccccactctgtgctcctgtgctcatgggtgccctgagagctcttttattcctggggctcactccagccctggcaagtagcaagatatcctggggttgagcctctcagtttcaaattttttatctcccctttccttcttgcaggctctgtcacctcctgtgagctgacacagccaccctcagtgtcagtagctccaggacagatgactaggatcacctgtggggaaaacagtattggaagtaaaagtgcttaatggtaccagcagaagccaggacaggcccctgtgtgggtcatctatggggatagcaggcggccttcagggatctctgagattctctggctcaaactcagggaacaggaccaccctggccatcaacagggcccaggctggggaccaggctattactgtaagatgtgggacattaggactcctcatcccacagtgacagaggtagatggggaagtgagacacaaaccccttccccatacgtgtcactcttgtcctccagcccaggaagactgtggacaaagccatgagcatgggtttcccaattcacctggatctgagaccccccaggctgccctttccacaggccctccaggcaggctctgcagaggggacatcaagactgaatttagggcagaggtgaccaggatatattgaggtttgggggactcagttgtgatttggggaaatggggccagaatggaaggtcaggccaaggtcaacatccttagttggtctctggatttccatagggggtgaaggccagtccttgggctgaatatcctgagtcagtttccagaactgcccagctcaggctcccatggcatcctgccattctctgaaaagggccctggcatgccaggtgctctgggttctgagggagagttggaatcagatcctcctgcaggaatccagggtcaggagaagcagcctcacctgacacagggaccacagatgcacccccacagggtgagctgcaggatggatgctgctcatctccaatcctcacatcctatgcaaaaaatcattcttttcacccctccttcagtgtatcaaagttgacacttaaaaagccttaagagcccactcttgtcaacagaaaacccattcacatctccatcagccacacaatctccacagaatgattcttcaaaaaacgataacagtagacatgaaaaggtatctaaaatgttacataaataattgaacttagattacatatgaaaatgatactatttttggtatgctaggtaaataaaatatattatttggactcctttactttcttctctttgtatttctaatgtggtgactagacattgggattccaatgaggctcacatcatattgtgattgaacagtgctggtctgcacctcttcaggtaacaggggctgtggagtgacctggtgcaggaagccccatctccaatcataggacatcagtgtgaacccagggagaggcactggtgcaagagaaatgagaacaggagtgtggaccatctgcttgtacaggggactgagccctcactttgagccaaataaactttttttctattttcaattctgaagaagaagactttcctggacttctttccgttttcagatttgtgccccttcaggtttggcctgtctggatcccagccaggggacaccgaggaaatccaggagtctcacactgactctgttgtatttcatctgctggggtcatcccaaactgctgcgtatcgtttcctttcctggtgctcaaatagctgctccatgcacttgtcacggtttcatagctcagtctaggtgggaagacaggatagtgtatgttataatatttaaatggaacctgaatccattcattgtttttgtttttttgtgtttttgtttgtttttgttttgtttcgtttttgagagagagagagagtcttgctctgtcgcccaggctggagtgcaatggtatgatctcggctcactgcaacctctacctcccaggttcaagcgattctcctgcctcagcctcctgggcagctgggattacaggcccccgccaccacatccagctagtttttgtattttagtagagatgaagtttcaccattttggtcaggctggtctcaaactcttgacctcaggtgacccacctgtcttagcctcctaaagtgctgggattataaaggtgagccaccacgcccgacccaatagtttttttaaaatatgaaatgttaaaagagttttgtcataggcattgggaaaggtgaaaatagattaaaaacattttaagaaaaaaaccaaaaatgtacttgtagactgtctgtgtgtcttcagtgttgcagggttcagagaggtcagttttatggttcactaaggaggggctaagatggaggaaaccaagaaagccaaaaacacacatctctgccactcaaaacataaatcaaagtaaaatggaaaaaatctttcaataaatcattcccaataaatatcactctggtgcacatagaaaggcctgttagcaaactttccctttcccctgctggctcatatccccatggatcacctgtgtgcagagtggactctgtggtccccatttctcaggctgagaaccagagactgggaaggacaagtcacctgctcatgagtgggaagggcaggattgggagcagctggcttgggttcaggactgtggccctggtcggtgctctgtgtccctccagagggtccctcccacatgtgccccgtgtggatgtgggtgcactgcctggggtggctgatgtgctccagggattcgatggtgcagatgcttcagcacaaaacgtggaggtggggatgggatgaggctgcagctggggagaccagagaccagcgccacccagcagaggtttccacggggtgggcagccccatttcctgacagtagagacaggctggaggtgggtgccaagcagagggcgctgtggggtatgcccaggcctagagagtcacagagacacaggcactacacagcagaggcactgagggccaggagctcactcaggtgagagacttcagcagatccttctctcctgagcaaatcaggtacaaaaaaaattaagttcctgccatcagcatgcacaaacaagaacattcatctcttcagctgagccctgctgtccagggaagcaaaagtctctgagcccaggcccacgtgagggtggggtgaggagaggagcccaggatgctgattttcatggaggccccgccctcctctgaggcaaaggggataagacagggctggggcagggccagtgctggggtcacaagaggcagcgctctcgggacgtctccaccatggcctgggctctgctgctcctcactctcctcactcaggacacaggtgacgcctccagggaaggggtcttggggacctctgggctgatccttggtctcctgctcctcaggctcaccggggcccagcactgactcactggcatgtgtttctccctctttccagggtcctgggcccagtctgccctgactcagcctgcctccgtgtctgggtctcctggacagtcgatcaccatctcctgcactggaaccagcagtgatgttgggagttataaccttgtctcctggtaccaacagcacccaggcaaagcccccaaactcatgatttatgagggcagtaagcggccctcaggggtttctaatcgcttctctggctccaagtctggcaacacggcctccctgacaatctctgggctccaggctgaggacgaggctgattattactgctgctcatatgcaggtagtagcactttccacagtggtccaagttcatggggaactgagaccaaaacctgcccagggccttcagacttcctccttgctctgaagatgcttcctcacccggtgcaagaggcttgctgcagcgcggccttgagaattcttctctctcagctccttccctttccaccatgaattccaacaggaaacctgccctgtggtttcccatccaggacagggacagcttcctgatgcttgtgtgctgtggtccctgaatgtgcaactcttcccagctcttcaaatgcagggacagtgacaaggagctgcctgattggtgcagtcactgcttttttcagggatgtcttcaccctacatgtatcatcatcccctacactgtgggtagaattttagcaactacattctaatggttatcgccacaactttgatcttagaaataacagtgcagtgaacatccctatgcaggctcctttgagttcctgtgtgaatacgaccataggattcatttctaaaagtgaaattgcgggtcagaaagatgtgtgtttgtgattttcacccaatgttgtcagattcccctccagagggattgtaccaattttcaatgccagctggaagtacttgttcagagtacattgttgaatgtggaaatttttgccaacgtatcagagtgaaaaatggtaccttgttacagttttatttttcagtctcccgttctgcttaaggttgggccttttcacaaatagttcagtactcttcatttttcatgatttggtaaactttataaaaaatatccagataagaagaattttagtctttgtggccagacacggtggctcatgcctgtaatcccagcattttggaagactaagacgggtgaatcgcttgatcccaggagtttgggattagcctgggccacacagtgaaccctcatctcaattaaattaaagaaaataaaaataatttttaaaaaaatcctttgtggtccaaggatcaactttggggatattacctatggacttatatcaccatttacaatgcaaacatttaaaatgataacaactactgtcagctgcagaactaatttgactccatcaaaaaaaaaaaagctaaaagattataattctgcatttccacatgttctggtggtcagagaccacttccttgacaagcagtgagtacggggatctgaagggtagttagcatttaggcaggtattgggtgaagaatagggatatacacaagaaactttcaaagagaaaaacacatggaagttggaacacagaagagaacataatatgtctgagaaataaggaaagtccagactcactggagctgagtgagaacaagaaaaatggcataagccatgtatttctctctggatatctcattaaaatattgtctcctccccaacacaccacccatgtgaattataaaaatgcccgttttaaatttttgtttgcatgtcgtgacagagtcaagcacgtgaatcaagctgagtttgatgagtccagggctgttaagccccagacccaggtggcctcagaaggacttggtggaacgagggcttgttgtcaaaagcagaggaagtgagattttccattgtggctgagaccagtttcttaaattccagtggacacacaaggccccttaaggatcggttaagatgcagatgcagcctcagcagttctggatgtggccccaaattctctgtgtctggcaactcccaggtgaggctgctgctgctggtcctcccaggaccacactttgagtggctgaactcttattcacccacctcactcaagccacgggtgagactcacacaaggagagcatattctagaagcacaggtcacttctcactcctccccttgtgtcttagatccttttctgttactataaagaagtacccaaggctgggtaatttatacagaaaataaaagttttatttggcagacagttccaatggctgcagagttcaaaatgtggcatctgctcttgttgaagacctcaggctgcttcctgtcatggtgaaaggtgaaggggagccagtgtgtgcagatgtcaatgggggagaggaagcaagagagaagacaaagatgccaggctctttttaataaccagctctttcggaaacaggggaattcactcaccccaagtgagggcattaatctattcatgagagatccactcccatcaccctaaaagctcccattagttcccacctccaatactggggatccaatttcaacataagatttggaggtgacaaagatcaaagccatagcaccctgaggtttggccacacacttgctcatctccacatttgtccctcccctcaggactagggtcctgactgctctgacttagtctccctccaccttatgggcacctggcagtcggtcatcatcagctttgctgaatcagcagcaacattgagggtaaaaattgtgtctcctggttccaccagaaataaagtagagccccacacagctgaggtgtggggtcaaaaattaaaactaagagacataagactcattctcaggctccaagtctggccagtgagcttctttgagactccctgggatcccagcagtgacactgatcactattgctgtcccacacatcccaagtgatgaggaagtaagaccaaaaccctcctgagattcctggcttgtgtcctgacactggggctgttgggattcctgtctttccttcaagattgttcaaataagcaccgacaatcacttccatgtgagatatgaggagagaataattccacatgaaccaaatccacgaagcctacactgaagcctgccaagttctctgcagtccagcacgatgaagggagcattttcatgggaacttttgggaatatgaggggagccaggctcagctatgggttccagagacaaagctcctggatgtttccccctggccttggtccatcacctgctacctctcctcactctttccacagatgctgccccaggttaagcccccacaggactctaagcctattcctgaccctgagctcagcccaagtgatgcttcaggagatgggatcctgagaatgagcgccaacgtctctttaacctgaggtgtgaggtcatgagacacctgttggccataagacacctgtcccccacctgctcaggagacagtggagcaggcaacagtgcagagagaaccagcaggagccaggccaggccctgcatccaaagcaggccccaatcccacagattctccagctccagcctggggtacagccccaactttctgtaggctgaaatgggcttctcaggatgggcaggccatgatgggggatggcagtgtgtccacaggacacagccctgctgcctgcctggccctcatgcccactccttccccaccctggttaatctccacccaaaagggcccaggctcagaactcaggacacctggatcagctcctggacttgcccccactgctttctgttcccctgagccacttagtctcttttggcctcagtgttacctgctgtgaagtgaggaggcttatactgaactgaggaagctcttttcttcattcaaaattaaaagacagaaacaataaagtcatgtgaattaaagccttctaaggggatgtcatttaatgggctccaatgggcttcagacatggaacttcttgtctttcctctgcagagattccaagaaagggactcaaaagggcttgctttctgtatgatgggaacagtgatctccagctgagtataagcaggagagtcctagtttcatcagcaagacagacaaggctagggtagaaatcctcctggcacaagctctgagaggtgtggaatgaaataaagataaacatgaaattaatgtgcctatgatggtgatgttagctcacaactaagctgcagaaccagaaacctggtgattgcagtgaatcatagctgctcttactgggtgggaggtgcaccagtttgcttcctaagtgcatagaaagcctgggtccctgtaggatggcatgcacatctctctggactttgaaagtgttgcagaagagcttcagttgactcactctaattagacctgactgaacaaaaccattagaggagggcatttcaaccctgagacacttctatagcaattgcacctgccccaccccactgaactgcgtgtgttacctctctgtgctgggctgggcagggcagattgggtcacactggcacagaatggggctggactctctggtcctcaacttctgaggtgacaggtgctgtggggtcacctggaagaagaaagctcctgggctgagtctcctccaccagttgggggcagcagagctgcagccaggagcagtgaggagagaggctggggctgcccagctggggcgaagaggaaggccagcctggggttcaacaggtgtccaagagtcagtcttcagactgaaaatgaagacagttcatcctatcccctcgggctgcagtgaccacgttctgagggtcagattcatacagtgtcacccaaggacaccgacagaagcccggcacagtgaaggcctcacctgggaaatgcaactagaagaggctgggcccaggtgtcagcttgggcagcttccttaggaaggggattccctgggagaagtcctgaggccgaggtgctctaggaggggcacaatgtgaggtgacagggctcccagggcccaggttcttcacccaggatggcggcctgagcctcctgccactctcagggccttgtccctccctgtccagcagtgtcctggggagctgagccctctatcgtgggcacttccagatacacccgacccctcctgcctctgcctttccttccagctccaggtggactctgactcaggacgcagctcctgtgctcaggggagattcaggtgggtggcgtgaagcattttggggccctggtccctgcatgaggcatcaccagcctccttcaggagatgctgtccagaggaacagggcttctcacctgcctcaggccacagctctcaccacggggctgtcctttgatcagtggcaggatctgcatggctggagggactactgaccacatgctctctggagctcatgtcttgtgtggagaccatgacctggggaccctcagaaagaccaagcagcctaaagttagattttcagtccagtgtgattctctggttcttttcgcaagtttacgtaaaacgttgatgagaaaaagtgaataaataaaggaagagttgaggatggcaattgctggtctactgtggggctgggggataccatggaaagagcagcaccacatgtcaaatgagactagagattgggatgcatccgaaatatgtgtggttgctcaaatgacaaaactcttccaactgcaatgattcataagtgtcctacagacacagtacatcatgtacataacattaccaggatggggccaagtgactcgggggtatcaggagcagggatgaaagaggagaaagatgatgcatctttggtgtacttgctgctgagtcaggcgtcatcagtgatttctcaacagggcccagctcagccccaggccaggctcctggaaggtccatagtcctgctcaatgcagcccaggacaggccacatgacacagaggtttgagacagggaccatgttgtcaatccccaggacggtgactgtgatcacaggccttggaggccaaggctgattttctgactggagaagcagacgaaggaagctggggattcaccccttcattttaagtttctcatgctgcccccagagctggcttgagggatatcccgccatgaggagtcccagagaagtaaatttgcataaacaccaaggatgcactgccccagtgggcctgagaggaaataagagaggcctgggaagcccagctgtgctgtgggctcaggaggcagagctgtgggtgtctcaccatggcatgggccacactcctgctcccactcctcaacctctacacaggtgctgcccccagaccctgccccaggctcagccctcctaagcccctggtcttaccctgaaccctgagctcagcccaggcatagcctcagggcgatactactggaatgggtttgttatcttcaagccccctctcttgtcctctcttgcaggctctgttgcctcctatgagctgacacagctaccctcggtgtcagtgtccccaggacagacagccaggatcacctgctctggagatgtactgggggaaaattatgctgactggtaccagcagaagccaggccaggcccctgagttggtgatatacgaagatagtgagcggtaccctggaatccctgaacgattctctgggtccacctcagggaacacgaccaccctgaccatcagcagggtcctgaccgaagacgaggctgactattactgtttgtctggggatgaggacaatccctcagtgacacaggcagatggggaagtgagacacaaactcctttttcatctgtgttgtgttcttcctccagcaccaggaagactgtggaccaagcaatgagcaggtctggccaagttctactggatctgagacctccaggccatccttttttccagctgtccaggttggctctgcagagggtggagcaggagtggatttaaggctgctataatcagaatttatggtgttttggggcctcatgagtgacttggggaaataagaactggatggaagatgaaagagatgtagagaaccatcacttgaccttagatttccatacgatggtgattgggtcactccttcttcaaaatatcctacatcagtcccgaaaaatacccacctcagctcaacacctgagcttccaggcttccatggcagcctgggattttgaacaggaaaagccaaggaggggacactgtggcatctgcctcaatacccttttctgagctcacccaacctcaactgctgggagcttctaggagctcagagctgtgccctcactgggaagtgctattagctccaaagaaaacttccttcctcatatttaggcccagttttgagagttttggtttgatgactgcctgagccaagaacccaaggccctgtcctaatagaggatgacactgaaaggccttccagatccagacatcccagtatggatgcctgaggcctcagttgcaaccctattgtgggtcagggtctccttctggtgggcgatgcctccctcactccttccagatcctctgtgcatgcacatctttttctcagagtctacttccaggaaacccaaactaagatggctggctatcaccaaaataaactaccatagacctgaggtggaaacaccagcgaatttcccaaatttccattgtgaacatccaaatgcccatttatatctgagtgttccttgtattcttataaaatgaaaatggagcctgacataccaggtttttggagtcctgaaggagatgtggagacagatccttctgcaaggaatccaccgaaaggggagcagcctcaccccatgcaggggctggagatgctcccacaggggcagctgtagcatggacgctaccaacctccaccctgcacatcctgcacaaacaatcactctttcacccctccttcagcttatcaaagttgacacttacgaagccagcacagctcacccttgtcaatcagactccttcaaacctccatcaaccacacaatctcaacataaagaatctccccaacataataataggaacagtagctatgaaaatggctataaaatatctcataaataattttagattgtgttcatgtgtaaatattatttttcacactttgggttaaataaaatatattactgaaactagtttacctttttattttttatgtctagtatggtgactagacagtaggattcacatgagactcacatcatgtgattgtacaatgctggtcttgtcttaccccttgaggtggcaggtgctttggagtaacctgcttcagcaagccccatctccacccgtaggacatatgtgtgaagccatggagaggcactggtggaagagaaatgagaacacagatgtggaccagctgtttatgcaggtgactgagtcctggagccctgatcctgttctaacctagatgtgtcacatccatctcaccagagaccgctgctggcctgccttagctcataactggggggatctggcagttcatgaaacatggtcgcttgatgtccagtgttatcctgtctctctcagggcccaataagacaaaaggagctgcttttagaaagggaagtaacactctactgcacatgacatggccttattccaaaaccccatgagtctacgttgggattctccagtggggtttgccatgtacaggaggtttcagttcccacagtagagtcagctggattctctggacccaacagcaggacactcacaaccctgcctgcacctgctgcagagcctcaatgctctgggcctggaaaacaatgggtgatatttgtggctcctgatatatgggttggagccacatccccaagtgtaaaatatgctactcctagacctttatagaccttgtgtctgtttcttcctggagggaattgaagggtataataacatgttctttaatttgtaggagactctcagctgctccagacaactgaagtcccaatttctgctaatacagaagagggaacagtttatttcccactcttaaaagtgcatggatctcacaaaagcttccagtaggccatgcccatcatgtatatgtgattcaactatgatatcaagatggtctgaaccctcatgatgatatcatgatagagataagagagctaatgatgctgggcagagaaagtgtgaatgtatactgtcgtccattccacctgaatgcacactgattctgatcctattctctgagggaaatagacaagacctcagtatctgcttcagtgaggtaactgtgcacctgcagccatagcattctgttcccagagatccccatctggcacagatattgctaatgccactattgcccatctgggtctgtacaaatccaaattcatcttccaggatcattcaactattgtagagatcagtccagtaaactgaaaacaaaaccccagaagtaatcacacgtactgcgggagaggagagagctgtctcagagggcacagtcttgttgaaattcctctgctccttgggaagaaacagcccagaaaaggccccaggggctgcgtctcatctgggttcctggatgaggcacaccccctactgcactgagattccacagaagctgggggtgaagtgcaaataccgtctttggttcatccttgggattttctttttatcacacactcgtcattttgtccacaatgtccaaagtttctaaagtgctgtctaatagatagaggttctttgtgcgctgaactaaaagctcttgggttggacaatggtgatgtttgcacaacatttttactgtacttactgccgcttaattacacacttaaaaatgattaaaaggatgaaacattttgttatgtttattttaccataataaaaatattgcatgctcaggaagcaaagtaattttgcaattatacaactgttaaaaatggaagaattatgtactgagcaccattttctctgttgtttatgctacaattcaactttctctctctctcactctttctctaattagcaatgatcttctgtctggtccaaggtcacacatttccagtcttccagaaatgtctgttgaatctgttaatttgttgccaggaagaatactcaaacttctcatgctcatatttgagtgttagctgtctccagccagcatttctaagccagaccctttgtcaaggcttttgaataattttgtgaaaagtacccccaaagatgacagtgttcactgttggcagcaggactgtttccatgcagtagggctatgctgggtgtgcagtggagctgtgcacactgtgctcacggggcagattctgtgctgctgactctgatccctgtgcttgggaggaccgtgtccactgctgagtctacatctgaatttgattctcaagaaaaaggtcattcatagctattggacactgagtcacatagagggacagaaggtggctgaggacaccttatctctgatgagcataaggggattagatctgctggtggaacaggaagctgaagaaacctgtggctctaaacatggaatttccagccctgagtctctgctgtccgtgcccctctcatctgtatgttcctgggagatgtggaccacgggggttagaggtgaaggggattgggaagctttcatgttctctctcaccatctcccttgcttatctaacacactcttacacacctactttattggagcttctgctctacaaacatggctgagctctaaattagagacttttgaaagtgcagacggatgcaggaactcgtccatctggagactttccaccacttgaagcagtgaacacgtctgtgcaaggctcagaatttcaagtgacaggatgttgggatttcaaagaaaactaaatctttggatgaaccacgacagaagagggaaggttcacacatttccctgctgcttgggcctcagtgaggactgactcagccagtctcaggctcctggagaccgcctgggagatctgcactaggaaaccattttcagcacagcctggggctggtaaggggcccttactctgttattctgctgcctgataattttgcatccagagaagaattaggacctgtgagtccaggaatttcaaagcccatagacaaggtcccctcattctgccgtgacagcctcagctctgctttcccaaaaaaagagcatcttcccagcatgaagaaccaggagcaaagagggagcttctcccaggggtgagcagggcagaagccaccttggtcagtgggaaggaaacatgctcagctcacatctgacccagaatgactcagtcacacctgtgcagggtcacctgtgtgtgagcatcatctatttgctccatgagaaaataccttgtgtggctcttgggtaaaatcataccataggtgacatttctctgcctattgcttcagccgatgcttttcgtgattccctttaggacactggcataaggtaagcatgtcaggtgtgggacgtattgaacaggaaaagcagaggcttctcatatcaatgctcgtggcttgtatttgggcccatacctcatggaaatgggaaaaacagaaaagaaaatgatactctgctcaaaaaagcactgagaaatgctatagtattaatatatcgacaactcatttattgagctaatgaaatattaacatagatagatcatttttatagggggatccctaatccttaaacattatattaaaaatttgtcagcttaaaggatcattaaaaggcctatgtttgattgaaacctggagtactgtactttgagtcttctaatcagccaatgagtgcagggagctggctgccctcccaggtcctgactggctccatgtccaggtagagcagcgctccccacaggcagctggaggaactgacgaggggaagctgttggcatcagggcctcaaaaatttgactcaggattttcccacgtcccctccccaagtccaggcgggttccaggacactcagaagagctcatcattatgggtctaggacttccctggtcctgctcttctttcttccttccccagtggccttaagattgtcactccctgtcacaggcccttcctttccttgtcaagtgcactccctgaattctctgctcctgggtcaggaaagctctggaacttcagggaaagcagtgctgggtgacccaatggggacccagaaagctggcccagggccagatacacaggcagcagggtgggtccctacagtgctgcctggtgggcatcaggtagaggggagtgaccaggaccaactcccctgagtgtcttcagggccaggtgaactagggagggtctgggacctggtgtggacccatgcactgacccaggaataggacaggaaactcctcagagcaaggactgtgttttcctcatgctgagctcctgaaaagcagtcttgccaggatagagtgggccagggtggatatatgttgggtgaatgagcttctgtctctgttttattgcaggagtcactacgaaggtacgctggccctgtatttgtatccagaaccagtcaaagccacctgtgagtcctgcatccctcagtaccaagccccagtcccccttcaggaccacccaccacacagagagacagacgtgcagggagcctgaggaagaacctgaaacctcctctactacatggagtgtttgtatttccatcaggaatcttgagcaccttgtgccgggtcttgaggcaggaaggggccacacagagaagaggagtttcttccctgaggtcagcagtccatgaacgaagggatcagggacttgagcagcagattctgaagcaacacctggacccaggaggcccctgagcctccagcagcccgcgtagagtggccaccagggggcagcagagagtaacctggcagaagcacctggagatggggtgggcctgggcatcagggagatgcccacatgcagggagggtcggtgaccatgacctgagatctggagggaaagaggttcttcttttcttagagtatttgtccttgacaccgatgtttacattcttctggcttcctggttctcagatctgactcttggagatgatccttatttttctgacacacattcaggcactttgcctcttcccatcgacctggcccccatctcactgtcacacatgccatcccatcctgtagtcagacgtgtcccacctccctgcctttgctctgggagcccctgtcctgcagacacagccacttctccttccctggccacccctcaacgtccactgtccccggtctttcctgactctgttctggggaacctgccaattcgtagttcttgatttccttatgagacacacaatacttactcattaatcttttgttgacttaagtttttatccattgttacattttcccagcaacagaagacaacttagttataataaacacttacttcctgggtcttggagtttgcagccccctctcattttctcatgaagcaaacatttccttcacctcctgatctgtccctggtcctgacagcaccctggtgatactgaggcacagcacccatgacctgacactagaactcgcagccaaggtagaaacttaccgcatcccatggatcttccaaaattctatgtgcccttggcaaccaagaattgcattctcctctagcacagaggagctgtgccctggaatggggcctgtacctgtccaaggcttgtgccgtcccctgtgggagatgagaagcgtccctgcattgggctcttggggacccgtcttggacatgagtgagaatgaagagggtccctgcattgggctctggcatgtgactttaaatggatttaggcctgtaccagacatctcatgtctgacataaaatatttacaatcaggacattactagagaagcagaaaaaagctaaccacctccctcctgagccaggatggaatgaaggaggggactgtggaccccagataattcccctgtcaccactgtgactctaacaacctcttaaatcacggccaacatctatcccataggaaggtctttatatcccctagaaaatacagaggaagtcagctctgagcttttccacgaccaacccagccaaggagcaaggctgggcacaacctgggtaaagatgtgagcccagaccatgggaccagtgggtgaaggaaaatcgcatgggctgagggggtgggtaagcaggggccagccctcctctctctgtttcctttggggctgagtccttctctggaaaccacagatctcctccagcagcagcctctgactctgctgatttgcatcatgggccgctctctccagcaaggggataagagaggcctgggaggaacctgctcagtctgggcctaaggaagcagcactggtggtgcctcagccatggcctggaccgttctcctcctcggcctcctctctcactgcacaggtgatccccccagggtctcaccaacctgcccagcccaagggttctgggtccagcgtgtccttgattctgagctcaggagggcccttcctgtggtgggcaggatgctcatgaccctgctgcagggtgggaggctggtggggctgaactccccccaaactgtgctcaaaggcttgtgagagcctgagggactgcacctgccaggagagagtagtgagttttcagttcaaagtctccatacaacaggaaagtcatgggccactggggctggggctgattgcaggggataccctgagggttcacagactctctggagcttgtctgggacagcagggcaagggatttcataagaagcatctttcacctgcaagccaacctctctcttatttatttatttatttatttatttatttatttatttatttttatctttgcaggctctgtgacctcctatgtgctgactcagccaccctcggtgtcagtggccccaggacagacggccaggattacctgtgggggaaacaacattggaagtaaaagtgtgcactggtaccagcagaagccaggccaggcccctgtgctggtcgtctatgatgatagcgaccggccctcagggatccctgagcgattctctggctccaactctgggaacacggccaccctgaccatcagcagggtcgaagccggggatgaggccgactattactgtcaggtgtgggatagtagtagtgatcatcccacggtgacacaggcagatgaggaagtgagacaaaaacaccctcccagcctcggtcaccctcttgctccagccccgggaagcctgttgataaagccatgagtgaatctggcccagttcacctggatctgagcctttcaggttgcccttccctccagccccctccaggagtctctacagaagatacatcaggcataaatatggcctggaagggccagaatcatctggtgacttggggctgttgtgtgagttagagaatgaaggcttgggtggaaagacagacagaggcaacctctgtccactgtcctacccctggatggtcatatggtggggacagggcaagtccttagaccaactgtctggatcaggccccagaactactgcccagttctgctgaggtcctggcccccaggctgtgtggcagcctgtgattcccaacagagcaaaccagaggaatggacactgtgaagtctgcccagatcccctcctcaatgtgacccacctggcactgctgagaagcccagcagctcagagctgtgccctcactgggaagtgctgttggttgcagaaagcttcctcaagtttgtgtcccttttcagaggggttcggtttaatcaaccaagatctcaaatccttgcctcaatttaagatgccactgaatgaagggcctcccagctccagagctccctgtgtggatacctgaggcctcaatgtcaactccatcacgagtcagggtctccttctgccccgtgttgcctcccccactcccttctgaatcttctgtgcatggacatctctattgcagagttagcttccagagaaccccatctaagatggccagctgtccccaacatgggtcatcagggacctgagtaggccactataaactgaaaactctggtttctgtccaaatttgcagagtaaatgttgaaatgcccaatctgatggttccttgaatttttatggaatgaaaagggagcctgacatgccaggtgctctgggttgagggattgttggagtcagatctccctgcaggaaagcccggggcagggggagcagcctcacccctcacaggaaccacagatacacccacaaggtgagctgcaggatggatgctgcccacctccaccctccacatcctctgtaaatgttgctcctttctacaactccaaccagatatgtagatgtggcgaactacgtaaaatacggatcattcatcacatcaaaacccactgcaggacaccctggtcaacaaagaacccaatcacatccccatcaactacatagtttccaaattttccatctccagaaaaataacaataacaatatacatgaaaatcgatgtaatttatctcatacataatttcatgttgataacgtgaaaatgatagtattttgctctactgaaataaataaaatatatatatatatctgaatttatttgtcttatcttttcatatttaatgtggtgactagacactagggggtcacaggaggatcgtgtcataccactatgggacagagctcctcacaactctttcaggtgacaggtactgttgagtaacctgctgcaagcatccccatctccaccagaccatataagtgtgaacccaggaagaggcactggaacaatagagagaaaaacctgcttgtgcagaagacggtgcccttgagccctgctcctgctccatcctacgggtgccacattcatctcatggtgtaatatttcgtgccctgcctgagcttatgaccgaggggatatggcaggtctgactgtgtggttactggtgtctcatgaggttctggatgtaacaaagccctcgaatatagaagaggttgttttcaaaaggaaataattatctactgcacatgacatagacttgttgctaaatcccatgcgtctacactaggattctcctctgaagccttgccttaagcacaaggtttcagttcctatgtccagttcctctattatggtagagtctgctagtttctctggcccaatagcaggacactcactcccccacctgcacctgctgcagagcctttctactcttggccccaaaacactgggtgacacagttctcagacccatgatttatagtgtcagtattcaggcctcaggggtccctgatggcttctctggctccaagtctggaaacacagcctccatgaccatctctgggttccaggctgaggatgaggctgattattactgcaactcacataggagaggtggcactttccaccgtggtccaagttcatggggaattgagacccaaacctgccctgggctctcagcctctctcttgttctgaagatgcttcctcaccctgtgcaaggggcttcttgcagcactgccttgagaatttcccctctcccagctcctctcctttctcaccaggaagtccaaaaggaaacctgctctgtgatttctcatccaggacagtgacagcttcctgatgcttgtgtgctgtggtccctgaatgtgcaactcttcctagctcttcaaatgcaggcacatagtgagaaaagctgcctgactggtgcattcactgctgtttttaaggatgtcctcacccaaaatgcatcctcctcccaaattgtgaagaacaatctggacagaggtcattacagggagtttcaagaaactgcatcttattcaattgtgtccaccatggtctggtaaagatggccctcctggatggactattcctctgcatgtctgtcctgaagcagtgaccactgtgagaagatctgaacatgtttgtgaggtattaaggacgagaggaaactgttgtttttattattcttttgtttttgtttttgaaacaaacttttgctttgtcgccaggctggagtgcagtggcagaatcttggcttactgaaatctcagcctcccaggctctaccaatgctccctgcctcagcctcccgaagagctgggataacaggtgaccaccaccatgcctggctgatttttgtatatttagtagagacgggatttcaccatgttggccaggctggtcttgaactcctgatctcaggtgatgcacccacctcggcctctcaaagggatgggaatacacacaggagccactgcatctggcagtgttttttttatttttgctcctcctctttgcctcaatacctcaggttgctgagctggggagattttgcgtgacaggctcagtgctccctcaaaatcctcccgtctcaattcgctggggccctgtcctggaaactccccaaaagtggatggtgtccctataggttgggagtttccaaaatggccccacagggaagagttaacgtgagtccattccttcttcctcattgacatccagcatttgtaatttccatgggtgtcaatacttttgtagctgaaatctttcttaatctactaaaggtgagaatgaatttaataaatattcagacattagttgcatccaatatttaaattttatgagtcaattggtagacatagccattattatatataatttaggcttcataaactttgattaaataggttttattaaaaacaaagtaaccattttattatgtgtttagactatatcaacatgttgtgtacctgaaatatccacaagaaaatatatttcaaaaaccaaattgtatttattgtctattgttgcataaaaattgctccctaatatttagcatggtaagagaacacgtgtttgtgatcttgtcacttcggtgcatctggaattgagagcagcttagttttgtggttctggttctgggttggtcatgaagttgcagccaagctgtcaggccaggctgcattcagaggccagagcaggtggccaggcccagcctgaggggcttccactgtccctaacctgtttgtctgatgtggaaaatctcagaggaaaaggagagagtgaagtgtaaggcacctgtcccagtcccccttgtcaaaggccatcccatacctgcaccatttcttattctttcctggggcgtcataggcatagagcactgcccattcattctaacgctgtagagtattctgtagtaggattttagccatgcagcctctaatggttatcaccatgattttgatcttacaaatcacactgcagcaagcatccctgtgcagactcctttgagttcatgtgtgcatatcaccataggataaatttccagaagtggaattgctgggtcaaaaggatgtgcatttttaacttttatccattgttttcatattcccctccagttctaccagtttacaataccagccctaaatattgattggaattcattggtgaaagtgcaagtttgtgccaacctatcagatatacaaagttatcttgttacacatttatttttgatttctcctattttgcttgaggttgagcatttactcaaatatttcagtgctcattatgttttaggatttggtaaaccgtttcttcaatgcctcggtaagaggtattttagtctttgccatgcacaagacaacgttgggataatatgtatgttctgatacaccatctacaacgtaatcattaaaacatataaaaaccactatcagttctggggccattaaaaaaattggtggcaggccagggatgtcccacaggatgtggtttaacggtctctggtttctagggttatttgaagtttgaacattgcacccgcatatgttctatgtggagatctctttgtgagggacactgtaattcacctcctctaggggcctgaggtctttctttggataagaacctacctgtaccatgtgtttgattggatcttgtgtctgctcaagacagccctgtgtcacaagctcatgactttcatcttcatccatttgctctgttttgtgagagcttcagtatatcaggaatagagattcctccgaggtgaaaaattagaggcagagggaggggcaaatgggcaaggaagcttgcaccaagtcgggagtgatccagtgtaggctgagagaaaaaaggtcttaaaatcagccttgtagctgaaaccaaaaacacacaagatggttggtgttctgagcatcattaacaaatgataaatgaagttgaacttttaaatgtattgcaaatttttataaagcaagtagatcgttaaactcagaatgcaacaatggaataaagaagagagtttgagatgtttttaaaatttatttatttatttatttatttttgagatggagtctcactctgttgccaggctggagtgcagtggcacaatcgcggctcactgcaacatccacctcccgggttcaagaaattctcctgcctcagcctcccaagtagctgggattacaagctctcgccatcatgccaggctaatttttgtattttttgtagagacatggtttcacaatgttgaccaggatggtgtcaatctcctgacctcatgatccacccgtctcggcctcccaaagtgctgggattacaggcatgaactaccgtgcctggctgagtttgagattttaactgtaagtcctccaactaagttgccatgacaagaacagggatgatgagagtggaaatatgttatcctgcaaattatcgttttatgtaaaagaatattttccctcttttaggtaaaggaagcatcttctggagcaccttctctctgactatcaaagcaccattaagccacaaataaactgtaacatgaagtaggaaacaactgcccttttatataaccattgagaggtggctttatatgcataccaaaatgttgatgctcaatgctaaaattggatttagtaatttaatatgcctacaagaaattaattttctttggattatattatttctgtgtacgatttatcttagttaacttggaaatattctgctctaaaaacaactcttgttttttgggttatattttctgtatcaactatagctcttttccaaatgctgtcagagatagcccatggctactgatcacaaaattcaattttatggcatttaaattattctatactctaaattattttaaaagtgcacagatgtgaatttttcacatctgactcaaaaatgttgctgatgttgactcacttttttatttcaatcttattgaagtaggagtttacttttctggaacctggatgataacaggagactggagaggaaaccccccaaattgttttcctttaaaccctcaggatgaatcatcctggataatcacccacacttgatttgggtgatatctaaatgagagttgggtcttagagtaggtgctgagttagtttaggacttgcgctgttggaatgagttgaatgtttttacaagtgagaaagacatgagttttttggagtccagagggtggggggttattggctgaattaagtcccccaaaatgtatgcattgaagctgtaacacacaatatgtgactgaaattgtgcatagggtctttaaagaggtgactaagtgaaaatgaaaaaattagggtggattcttctcaaattggactgatgtcctcctaggaagaagaaatttgcacacacagaaatgaggcaccagaggtgagcgtgcagagaaaagaccaggtgaggattcagcaaggaggtagcaacctgcaagccaaggagagagtcctcaggggaaaccaaacccactaccacctttatcttgggttttccagcttcagaactgtgagaaaatatgtttctgccatttcggtcactaattctttcctatcttcttgtgggagctctagcaaaaacaagagggaccccaaagaccttggatgagggagaaggaggagatggagcagggtgcaggaggcggtgcaggaaggggctggaaggtcgggctctgaggtgcatctcctgggtggaatcttgactccactccctattgtctggaggacttgggaaaaacatttaacctcctaatattcactcactaataaagatgggcttgaagcacaaggctccccatcatcctattctatattacaaaagtcttcttgaggtaacacttgtaaaactctcgctaatgcatctggcatgtattatggactcataagtagcccttctgagtgatctagtgatgtgcagaaaatggcattcatgctgtgtgcaccagggggcactgtgaggtttagtctgaggcccctaatgagtccaagcccctagtaatgctcaagggcgaagagcctgactgttgcttcctatgaggccccttctagtgggtaaatctgaaaatgcacttggcccttcttctgatcttgagaaattactcagagaaggccatcaggctcagggctcagacaagaaccaggacaaatgttttagggaatggagaacagatttgcatccactgctcaccagagccacctaacgacgacacaagaataaaggaagtagatttgcatgaagagacttcccttcctatgataagagaggcctggaggttcctccttagctgtgggctcagaagcagagttctggggtgtctccaccatggcctggacccctctctggctcactctcctcactctttgcataggtgctgcctcccagggctcaaccccatattatcatgctagctgtgccaacctggccctgagcttcggctcaacacagggagtagtgtagggtgtgggactctaggcgtgaaacccttatcctcacctcttctgtcctcttttgcaggttctgtggtttcttctgagctgactcaggaccctgctgtgtctgtggccttgggacagacagtcaggatcacatgccaaggagacagcctcagaagctattatgcaagctggtaccagcagaagccaggacaggcccctgtacttgtcatctatggtaaaaacaaccggccctcagggatcccagaccgattctctggctccagctcaggaaacacagcttccttgaccatcactggggctcaggcggaagatgaggctgactattactgtaactcccgggacagcagtggtaaccatctcacattgacacagacagatggggaagtgagacagaaaccccttcactatctgtgtcatcctctctctccagccccagcaggactgtgaacaaagccataaacagggctggcccagttcacctgcatctgagacctccaggctgcctttccctccattcctccaggtaggctctgcagaaggtgggtcaggatgatgtgaggcttgaaggaccaggctgttctgctgttgtttagactgagtgtgccttgcctcaagatgacctgaatggaaggaccacaagaaggagatgggcagctgttgagtggtcatgatccctggagttcctcttgtgtggtgactggatctaacacaatgcctgtactttgtggcccaaatgccctggattattggtctgaactccccatgtttaactgagaccctcaagccccagctccatgcatcctgatgttctgaacaggaaagtcttttctagtgagcactgtggcatcccttggcatcccagcttcacacagcaattccccaccaaaaaatgcctttgagtgcaaagaacggcttcatgcaaagatgtgcctccttcagaatgtagttcaggagcaataactacctgatgccttaatcccaaagccatattttaatttagaatgaccttgaaatgccttctagctgagcagtcagttgtaacacattcccagtcacgcctcccacacttctttcctgacagtatgtcatgaaaccctactgcatggaatcctgcctcttagagtaggattccagggatctcaaaaattgtttagaaatgaacaaaaacagtctagttggaagagtatcaaagaggaggcagttgcacatgcagagaactctgaggtctgcaaatatacatgaactgatgagcacttgtgtgtaaagaaacacctccgaaagagaaaagaaccacgcaaagactcttgagggaacacctcacagagctcactcccacacacacccacccacgcactcacagacactcacacactacagtcacagaggaaaggcctgacttacagggcatgaggttgactcatcagaagagctttgcctcagtactggggaaaaagtcaccctagacaaaatgctgctcaggtctcaactatgaaagtgtaaaagcaaacagaaaactcaaactgtttttctgaacagtaaagtaactttactgaattcaacaataaaagacagaaatagagaatgaactgcaaaagaattctcaacccagcaggaaaaatgcacaatgccttcatcctgtcaatatttcctgcaaggtaaccagaaaatatatgctatatcaaacagagaagtgaatcaatcccaaatggcaataaaattgcacacatgatagaccttgtaggcaaggatatgaaagaaattcttataactctattctattctacttgttcttgaggatataagattgaaaaatcatattaagtggatacataaaacatataaagacagacgcaagttatactcttataaatgatccataatatgtctgcaataaaaaatacactgaatgagactgattgcagattggattctgtgaaagaatagatgagtgaacttgaagatatggcaatggcagctattcaagacgaagcacaaaagcgtaaacagagtatcagtgagttttaggacatcttcaactgcctaaattggtataatgaaagtcattaaaggaggtaagattggacagggaagagaaaaggcagaaaaacaatttaaaggaacaatgaccaaaatttcccaaattttgtgaaaactagaaacctcctattccaaaaagtttaacatgtcccaaagacacacacacacacacacacacacacagagagagagagagagagatagagagagagagagaaagagagaaagggagagagagagatacaggtgaacaacaaaatgacaagaacaaatttggtttttaaaaatttttttaattttagtggcttcatagtaggcatatatttttattgggtacacgagatgtttcaaaacaggcatgcaatgtgaaatagccacattatggaaaattcggtattcattcactcaagcacttatcctttgtagtataaactattcaattacactcttttagctttataaaatgtacagttaagttgttattgactatagtcatcctgttgtgctgtcaaatagtaggccttattgattatttctaactagttttttcttacccagtaaccatccccaggtaatagttgatttcttattagaagtaatgcaagcctaaatcagtggagttacatttagaaaatattaaatgaagaaacttactacccaaagcaatctacaaactcaatgcaattcctatcaaaataccaatgatattattcacagaaataaaaaatcctctaaaattggtataaaaccctaaaagacgctgaatagccaaagcaatactgagcaaaaagaacacagctgaagatatcacactactagaattaaaatatgctacaaactatagtaaccaaaacaggaagttattggcatgcaatcagacactgagaccaatataacaaaatagaaaacccgtaaataaatccatatatctatatatagctgactttcaacaaagatgtcaagaatgtacactgagaaaatggcacaattttcaataagtggtgctgagaaaactggatacccatctacagaacaatgaaactagacacttatcctctccacaaaaaaatatcaactaaaaatggattaaaggcccaaatataacaccccaaactataaaactactagaagggaacttaacataggggaagaacaaattctttaggacattgttctagataaaaaattatatggccaagacttcaaaagcacaggcaacaacaaataatagagatatgggacatcattaaactacaaagttcctgaaaagcaaaggaaacaatcaacagagtaaagacaacatgtagaatgagagaaaatatttgcaaactgttcacttgacaagggcctaacattcagtgtatgaaaattttaaaaaaactgaaataactcattagcataaaaaaactaataatatcattaaaaatgggccaagaatttgaagagacttttctcaatagaagatatacaaatggccaacaggcatacgagaaaaatgttgaacatcactaattagtgagggaatgagaatcaaaaccccagtgagatacaatctcaccctagctggaatggctatgatcaaaaagacaaaaaatgcaaagctggtgaaggtaggtgacttcacatttctctagtccgattctctgggaacaatgagagtgctctgtctttgctctccctctagtaactatttttcacacgcaaaaatatggaccctagtgggaaataatgcctaagaccaccaacaccttaatcatttgttcatcacactagaaatgaaactgttttccaaataatattaacatctatctgtgtctatcgccattgtgtcaatgtctgtgtgatcctataacatttagaaggcctagaagaatgcccttgctttttgcaatatgaaaatggccgatatcatagatgatatagatatagatagatagggggttgtattttgaaatgtatttctctaaaggacttctttcacttcaaatttgaaattattcttgttttaaatgtcacaaatgataaaccttatagaatgataacacaattgtatgtgttataaagtcacagggtctatcaaatgatgaaccaatcattcggtgttgaggttagtagtattttttttatttcgattctcactaaatgagaacacgttttgtattgaggggccatgccctaaccataccacatcgtggggttgctcagagactgtgaggttctgcccacactaagccagaaggagaattttattcctaagccaggatgagaattttattcctcacactgctctctgcacttgtttgtatcccataatatcccccaaaagtgagcatgagaagttcattttttaagctgcttgttcattctcttacatttaatacatgtaccaaaaattgtcttcatttttaaaataaaatgttatgctatcttgtaatctataaccctatagaataatcttgatccatacacttttgctatcacaagcagaacaagatccacttcctctctctgggataaatcccatgaccgctgctctttgagcattatttttcttaagttattttttaaacagaaatttatctgacttaccttaaccaaatgtcttttcaaagtaaccgcatttcttttaagtgaaaaattaaatagttaccttctgttatcaagaattatctgaatacaaaatatttattgtttcaactttagaaggaatgaaaaacatctacaggttactaatctaaaaatgcaggctctgggtttctatggtgttaacatgtcttccaaattttaagtaacaggtatttaaataacatgaactttgttttcaaacttagaaaatgtttcaaccttttggctgggcatggtggctcaagtctataatcccagcaatttggaaggacgagctgcgagttttgtctgatcccaggagctcaagaccagcctgggcaacatgatgaaactccatctctaccaaaagttataaaactttgccaggcatggtggcactgcctgtagtcccatctactcaagagactgagatgggaggattgctggagccagagaagttgaggctgcagaaggtaaactgtagaggctaaaacatgataaatatttaattcatcacttaaaagaaatgttggttacattgaaaagaaatttgattaatgtaattagatatatttctgtttaaaaaataattgaagtaagccctgttagcaccactgcattccagcctgggcaacagagcaaaacctgttaaagaaagaaagaaagaaagagaaggaaggatgaggaaggaaggaaggaaggaaggaaggaaggaaggaaggaaggaaggaacgaaggggaaagaaaaaaaggaagaagatatttcaagctttacagtaccagagccactctgtaatcaataagcaacaggaccaaaacagaaagagattctgtagaacagtctaaccagcgatacaattatacatttctgttcagatatcaaaaccattttcaatagtaaatatatggaatgaactccccacagagatcaagtaggatgtatgatgtgtgaatgaaattatgagttgagagtaggaaatttataaatttaatcaaacaaattaaagcattatgaggaagttgtactgctaatgtattacttggcaagctgttcagtggaacaccaagatattcttaaggaagttgcaaatatcttttaaaatgttatcattgaagtggatttttaaaaaatgaggacatgaatacctttacaaagtattcagggataaagagagaaaaataaatttagattgtgcatacatatataaaatttattttaaaagataagcttgtcttttttatcccttaaataaaaggagcagatatttaaattccttgtcttttattttaaaatttagaaaatgcttacagcttcccacactgaaatttatactaagacagataatctaatcaagggataacaaaatcaaaacagaattctcttgatgaatctattttcttgatttttaagtctcagtgtgtactctatagtaaaactatttataattgattctgctgtttgaaaatatttactgatcgtttatcttgcaccaagtgatctccagctctgaagataggtcagtgggaaaacatacaaagttgcccagcttcgttaaacttaaattctaatgaggaaaaaagaagtaattaatcagggactttaaaacaggagtgttgtgatatggcttggaattctaactgcttcctgtgcttgctgtgtggagactggattgaaaaatagggcgatagaagcttaaattcatatagaatatggctagcctgtattttgagggcccctgaaataagaatgtatagtagttctcattatttcctcaagaaatctgtgcagtagagctttggccttgggagggaagtactatagtcaccaagtggtgagggtgggaaggtgaatttgcaaataccacttggaatgagttcactttaaaggtaaagctggcaggattttcatacatgtcagatctgaaaaaatgtgtgtgcgtgtgtgtgtgtgtgttatagagagagagagagagagagagtgaaaaccagacagataccgagagagaacgacagatctgcagtgacagagagaattaaaagcggacaccacgaatattgagctcagaaactataaaatgggaggtgccattaaacagaatggggaagagcaagtttgaggagtatcagtggctccatgtggacttattgattttgacattcctaacagatgtccaaatggagaagtcagacagtgttgtgcgtagtctagtgttaaggtatcaaagaaaatatcaggaaatgagtgacacaaaaattagtaagaaagcaaagataagaaacattagtcaaagtcctgagtccagtggttatctaacacccaaaaagtagtaggccgggtgccgtggctcatgcctggaatcccagcactttggaaggccaaggcgggcagatctcctgaggtcgggagttcaaggccagcctgaccaatatggagaaaccctatctctactaaaaatacaaaattagccgggtgtggtggctcatgcctgtaataccagctactcaggaggctgaggcaggagaatcgcttgaagcagggaggtggagggtgtggtgagccgagattgcatcattgaactccagcctgggaaacaagagcaaaacttcatctcagaaagaaaaaaaagtgataaagacaagaagaaaccagcaaaaaagtactaggggtaattatcaaaaatgtcaaagggaaagtaggttaagtgttctggaattctctcaaagaaagttttgaaaaaaggagggaggaagagatcaactgctttcaatgctgctgatacataaattaagacaaaggctgaggaattatgcttcaattcatcatttaacgatatggatattgtttgtgctttgataagagcaattttcttggagtgagtaggtgagaaaccatattggagtggtttctcaaaggaatgcctgatctctggattcttaaggaaactttttattgaacagtggaggcacaaattggatttgttttaattccggggtcgggacacactctaaacatgtgcctctgcatgcctcgcttattacagctaggtatcctagtatctttcagtaacagaataatcacctgcaaaacccacacccatttaatagacacgctttacaaagactgatactagaagttgttggagaggatgtggttccacgtaatatcttatgagtcactgatgggcaagtaagctggtaaaatgtctttggaaaactcactatacctgctatactaaaacattcagataccaaacaccagaaattccatattgtaatatatttctatgagaaaaaaacaagagccctgtattaaaatatagattattattaaaaataatcacactgggtttcctgatttttttattagcaagtcagtctctgcctgattcaatagtacaacctctatctaatatatatatatagtgtttttaatcaaccactaagaaaaagtattatattttatatcaattctacattcagtgccgaaaccagcattttgtagattccagagatttgttgaataaataatgaataacttaaataagttaatatttatagtatccatatacaaataatacatcatctcagaatacaataataacgtttgttatgcagaaaatgatttcaatctcagttaaaaatattttgggcttaggagttactgtcatatatggatgctcacattgttttgtttatacgaaaatgtttgtagttaacgtacgtttttggtacttaagccttttgttcttgctgccatagcaaatagtgtgcctattaggaacaagaaccagaggtttacttcatcttaacagatttcttaataaaatacatgccatactgtttggtttaatgcataagcaaagagtcattcactccgccattgctacgtgtccctcctctaatacggctcctgaagatgttaccgatagcagaggactttgtgttcaacctaagcactttatagccctttcactttcaactaagtatgagataaaataattcagcaccaataaaacaaacacttcttaaatactgaccctttttttgagcctgtttcacgttacgcagcaagacagagtacacttctctttcccagcaaatcagtgttggcactacaccctctacactctgaaaacttgtattattggcttccttagaaacacaatttgagcttataatttagatgtcatcaaataatgtacaaaaatatgctacttccttccccttcacttctcttctcttctcttcttatcagataattgtcagttgttttttctctccaactcctttcctccgactacctgatttttaaaagactttctgcacatttccaatcttagtattgtagagacaaaatgtgtggtcaaactgcatatataggaagagctgaattatatgcaagcatttttaaatacacaattcctcctcagttttctgtgattatttcatataatcaaatgtcttccagatacacatcccaaacgagtggttgtcaagctctgctttgtggtctaatttcatcagaattatccaaaattcttatgataaatacagataaattgacataactccagatttatgaaatcaacatttccagaacccaggaatatgcattgaaaaagtgtattcctcagatgatgctgacatgatacgggatccgagtttacaatgcaaggaaaattaccttccttgcccttcagctgacccttgtatccagaggtcctcttcccctttcatattctgccctctctccttctgcacctttctcctttcctccctccagttctgctcatccagatcccaagccctcccccatggattccctaaacctcccaaatggtcagttgccactaaagttccctctgtctcatgaacaagttatgtgggcaaatgtaaaatttaagcttggaccaagctgactcaagagcggcaattacaaatttccctaaacccagaggggaccagcaaacacttgtagaagattagagatttcctgtgagtgcaaagggctcagagtgtcctgatgctgtagaccaaatcttactgtcccctccaattcatgtgttaaaatctaattccctatgtgatgggatttggaggtgaggccttggaaggtgattaagtgatgaaagcagagaacccgtgaaggggatcagtgtccctatcaaagggacggctgagaactcctcatcccttctgtcatgtgaggacacagtacaaagatggccgtctatgaaccaggaaggaagccctcaccagacacaaaatgtgctgaccactcactgctgactccagtgagtcagaggagcgcaggccacatacctgggtctctgcctccatgcctcccacagtgcccagggctgagagcagagtggcagctgctgactggggctgtgctggccacctgctctcttctacctcttgctcaagccatgctttcagccccatggctgaggccagtggctagagcaggtgccatgatgtcaggcagctccttaatgggctggtccttggcaggaccagggcaggggcaggagggctctgcagctgcctctagctccagttctgtccctgaagggggctcttcccctagtgctggcactggctcatcagctggtgctggaaggtcctggattgccgcacattgagcaggagatgaaaaagaagaaagagtcaccaatgtcagtcactttccactggaatttccacacacagaatcagcctcactgaattaaaggaattccagtccaaaaacactgcccccgcaaagtctccaaaactacaggccccccctcaccatgtgcctgtgcctggaggaactccagaggctccagcaggccaaggacaatgcacggatgtggcccggatgggatcaccagtgaggcctggcctcgtagggcctgcccagggctgtcctgtggtacctgggtgcgccttcggccagaggtgcctggggtgaggaatgagcctgcatcggcatcatgggaaaaggctgtcactctgggccctcctgaagcaggagcctcaagatatgcggatgcagcatgagaacatcttgctctcctgagcatctcccaccaagggaactggctgcgggactgtctctaggatgtgggtgcctggttaccagaattctaagttctgtgagggtatatcaccaaggaagtgaagtcacttctttaaggttccgtatcctcagccccttccttccataagacctactcagaaccccctgggctgctggctgctcaccctccccccaggccagatccttacctgtacacaggtaagtccacccagggcctgcttgtacacgtgctcctgatgtgcacctgggacctaggaatccacttagggcctgtgatccaacaggggcctaatgttgtttaaaagtaatttttattattcctacaggaaagaaaaggccttctagcaataagaagcacagtttcacatcaaaaacataaaaatgatcaaaatcttggggaagaaatgtatcaattttaatcactgaaatgttaacttttgataaatatttaagtttataaggaaaaataaaaccatgctgataaaaccacagttgtagggaatgctatagagtttctcctttgtggtttgaacacagaaaggtcccacctagttaggctcataattttctaccttaatcttcttgttcttatgattaatggaaaaaataccatgacaatgatggtgatgatggttcaagtacacactgaggtttagtgacagaaacatcaggtgctcccagttacagtgcagctgttcttattggggtgggaaaatcaatcttgtgttcagtatacacgggaagcaggagtacatgtggatatgaccacatttcactggacttatattttaaacagaagatctacagtttattcttcaaaaaataataacacttgccatgcaaagtatatatataagatgtctcaaataattgtacttacattgcatatgaaagtgatacattttgatatgctaggtaaataaagtaaattatttaactcatttacttcttccctttgtatttttaatgcgatgactagacattcagatttccatgaggctcacatcatattgtgaatgaacagtgctggtctgcaccccttcaggttacaggggctgaggagtgacctggtgcaggaagccccatctccatccataggacattggtgtgaacccagggagaggcgctggtgtaagagagatgagaacacaggtgtgaaccacctgcttgtgcaggggactgagccttcacataagttgacacttaaaaagccaccacaccccacccttgtcaacaggaaacccattcacatctccatcagccacacaatctccaagattcttcaaaaagtaataacaatagccatgcaaagtatatgatatatatcataaataattgtacttacattatatatgaaaatgatactctttttgatatgctaggtaaataaaatacattatttaaactcattgacttcttctctttgtatttataacatgacaactagacagtgggattcccatgaggctcacatcatattgtgattgaacaaggctggtctgcagggcttcaggttacaggggctgtggagtgacctggtgcaggaagccccgtctccttccataggacatcagtgtgaacccagggagaggcgctggtatgagagagatgagaacacaggtgtgaaccacctgcttgtgcaggggactgagccttcacttggagccaaagttttctttcccaggttcaatcctgaacaagagggccttctggacttctttttgttttcaggcttgtgccccttcaggtttggggctgtctggatcccagccaggggacactgaggaaatccaggagtctcacactgactgttctatttcatctgctggggccatcccaaactgctgtgtaccatttcctttcctggtgctcaaatagctgctccatgcccttgtcatggtttcagagatgaatctaggtgggaagacaggacagtgtatgttataatatttaaatggaagctgaatccattaatatttattttaatatgaaacattaaaagaattttgtcataagcaatgaggaaagaggaaaagatattcaagttattttgagaaaaaataaaaatgtatttatcaaatgtctgtgtgtcttcagtgtcgcagggttgagagcagccagctttaggttgccctgaggatgcgctcagatgggaaaaagcgagaaagcaggaaacgcgtctctgtgacctgacagataaatcacagtaatggaaataagtctttcaataattcaaacattcacaataaatatcactctgatgcacacagaaaggcctggtaacaaactttccctttgacctgctggctcatatccccatggatcacctgtgtgcagagtggactctctggtccccatttctcaggctgagaactagaggctgggaaggacaagtggcctgctcatgagtgggaagggcgggattgggagcagcagactcgggctcaggactctggccctggtcagtgctccttgttccctccacagggtccctcccacatgtgcccgtgtggatgtgggtgcactgcctggggtggctgatgtgctccagggattcaatgcggcagatgcttcagcaccaaaggtagggagtagggatgggacgaggctgcagctgtggagaccagggacccatgatgcccagcagaggtttccacggggtgggtagccccatttcctgacagtagagacagcctagaggtgggtgccaagcagagggcactgtgccatgtgcccaggcctggagggccacagagacacaggcgccacacagcagagacactgagagccaggagctcactcaggtaagggatgtcagcagatctttctctcctgagcaaatcaggtacaaaaaaattaagatcctgccatcagaatagacaaacagggactttaatctcctcggctgagccccgctgtccagggaagaagaagtctctgagcccaggcccaggtgagggtggagtgaggagaggagctcagggtgcagatttgcataaaggccccgccctcctctgaggcagaggggataagacagggctggggtcaggcccagtgctgggatctcaggaggcagctctctcggaatatctccaccatggcctgggctctgctcctcctcaccctcctcactcagggcacaggtgaggcctccagggaaggggcttcggggacctctgggctgatccttaactcctgctcctcaggctcacctgggcccagcactgacttactaaaatgtgtttcttcctttttccaggatcctgggctcagtctgccctgactcagcctccctccgtgtccgggtctcctggacagtcagtcaccatctcctgcactggaaccagcagtgacgttggtagttataaccgtgtctcctggtaccagcagcccccaggcacagcccccaaactcatgatttatgaggtcagtaatcggccctcaggggtccctgatcgcttctctgggtccaagtctggcaacacggcctccctgaccatctctgggctccaggctgaggacgaggctgattattactgcagcttatatacaagcagcagcactttccacagaggtccaagttcctggggaactgagaccaaaacctgccctgggctctcaggccccctccttgctctgaagatgcttcctcgcccagtgcaagcggcttcctgcagtgcggccttgagaattcttctctctcagctccttccctttccaccatgaattccaaaaggaaacccgctctgtggtttctcatccaggacagggacagcttcctgatgcttgtgcgctgtggtccctcaatgtgcagctcttcccagctcttcaaatgcagggacagtgacaaggagctgcctgagtggtgcagtcactgcttttttcagggatgtcttcaccctacatgcatcaccatcccctacactgtgggtagaattttagcaactacattctaatggttatcgccacaactttgatcttaaataacagtgcagcgaacatccctacgcagactcctttgagttcctgtgtgaatatgaccacaggattcatttctaaaagtgaaattgcaggtcagaaagattgtgtgtttgtaattttcacccattgttgtcagattcccctccagagggattgtaccaattttcaatgccagctggaagtacttgttcagagtacattgttgaaagtggaaatttttgccagcttatcagacagaaaaatgttaccttgttacagttttatttttgagtctcctgttctgcttacattttggccctttcagaaatagttcagtactttttctttttttaggatttagtaaactttataaaaaatatccagataaggagaattttagtgtttgtgggcaggcacagtggctcacacctgtaatcccaagcacttcgaaagagtaagacaggtgaattgcttgttcccaggagtttgagattagtctgggccacacagcaaaccctcatctctattaaattaatgcaaataaaaataaattttaaaaagaattattttagtctttgtggcccaagaatcaactttagggatattacataggtacttataacatcatttacaatgtaaccatttaaaaagataaaaatcactgttatctctgggccatgcaaaaacagttgtcaggccaggagtggccacaggatgtggttgaacggtccctggtttgcagagttatctgaatgttgaaaattccaccagcatatgatctaggtggggatctctctgtgagggtcactgtatttcacctcctgtattcggctgaggtctttccttggataagaacatgctcacatcatctatttgatgggctcatgggtttgcccaagacaaccctgtgtcacaatcacataacttttatctgcattgcttgttctgagttttgggagagctttaatatatcaggaatagactcctcctaagggaaaagtctgagggatatggatgggcaaggggtcaagaaagcttctaccaaagctggaatatccagggcaggctcagagagaaggatcctaatatcagcatttgactgaagccaaaaccagaagagaacatggacgttctgagaataataagtaaataaacagtttaaattttaaatgtattgaatattcttatactccatgaaaattctagaacggaatttaacaatgggataaggaagagagcttgagatgttaaactataaagaccacaaggcaagttgccaggaaaagaacaggacctttttagtggaaataggtttctgctgcaaattacctttcctatgaaattggtttttaggtataaggaaacatcccatggaacattcttctttcctacagtcaagatcaccctcaccccacaagggaacctcaatatcaaatagaaaaaataatgcactttgtataaccattaggagagtctttatttgcacatcaaaatgaggatggttaatggtaacattggaaatagtagtttaatatgcataagtgatgaatttcttttgactataccatttctgtctgtgatttatctttcttaatagggacatactctgttcttaaaacaatttaacttgtgttatcttttgttctattatctgtatcagctctgttttttttttcaaacactggcaaagttattccatggttaatgattattaaattcaatttatggatatttagattatttaaattatttcaagagtggacagatgtgatttccccacatatacctcacagatgttgctgatgctgacttgttcatctcttccaacctctgcaaacaaagtgggaaattggatttttctgaacacccagatgacaacgggagaggaggtgaaacccccctaaagctgttatcctttaacccctcatggtgaatctcccatccacacttgagttggatgatatgtaaatgagagtttggtcttagagttggtgctgagttagttcaggatttgggttattgggatggagtgaatgtgctttacaagtcaaaaactatgagtttttgtgtgcataggttggagagctcttggctgaattgtgtcccccagaattatacaatgaagttctaatgcacagtgtgtgactgaatttggagacagcctttacagaggtgattaagtgaaaatgaggtcatgagggtggcttcttctccaatctgactggtgttctgagaagagaaaatttgcacacatagaaatgagacactagagatgagcatgcggaggaaaaaccatgtgatgacacagcaaggaggtagccacctgcaagccgaggagagaggcctcagggaaaaccaaacccaccaacacctttatcttgactccccagcttcagaactgtgagaaaataagtgtctgctctttaggccagcaggtctttggtatctcattaaggtagcactagcaaatgaaaacaaaagggaccccaaagaccttgggtgccagagaaggaggagatggaggatggtgcaggaggcggggcagggaggggctggaagttcaggctctgaggtgcatctcttgggtgcaatcctgactccactcactgctgtctggggacttggggaagaatcattaacctcccaatattaattccataataaagattgggtcttgagcatagggctgctcatcctcctattccatatgatgcaaatcttcttgaggtcatgcttgtaaaacactcagcaatgtatctggcatacactatggcctcagaagtggttattctgaattttctagtgatacatagagaatggcattgttcctgtgggcagaggaggcactgtggaccttggtttgaggactcagaaagacaccaagtcctctggtagtgctcaagtgcgaagagcgtcacagatgcttcctcccaggccccttctattgggtaaaatttactctccactcctgacacccatctggtccttcttctgaccttagcacattatcagtttgaagacttaaggctcagggctcagatgggagctaggacaggcacactggggaatgcggagtagatttgcattcactgctcatcagggagcccacccaacaaggatacaagaataaaagaagtagatttgcatgaagagcctctccttcctatgataagagagggctgaaggtccctccccgctgtgggctcagagacagagctctggagcatctccaccgtggcctggacccctcccctgctcaccctcttcactctctgaactgcctcccagggctcagcccccaaaggaccagagatcagcctggacctgagcttcagctcagcacagggagtgatggagagtgtggggtctgggaatgaccctcatcctcataattacctcttctgtcctctcttataggctttgtggcttcccgtaagctgactccagagccagcagtgtctgtggacagtcagcaagggtaacctgccagggagaaaacctaagaagccatggtacaaactggtaccagcagaaccctgccagatgcctgtgcaggtcatacatggtaacaacaaccagccctcagggatcccagaccgattctctggctccaagtcaggaacacagccaccctgaccatcactggggctcaggttgaacatgaagctgactattaccgtcactcatgggacaacagtggtactcatctcacagtgacacagacagattggaaagtgagatctaaagaccttcactgtctgtatcaccctctttctccagccatagcaggactgagcagggctggcccgggtcacctggatcgaagcccttcaggctgcccttccctccagccctcccggcagactgcagagagtaggtcaggataggatttggggctggcagaaccaggctgtcctgctgttatttggaatggatgtaccttggctcaagatgacctgagtggaaggacagtaagagggagacagctactgagtgctcatggtcactgaatttcctcctgtgtgttgactgaacccaagacagtgcctctactctgtggcccaaataccctggattatttctctgaactgcccatgtttaactgagaccctcaagccccagctttgtgcatcctgatgttctgaacatggaagcctttcataatgtgcactgtgacatccttcagattcccatttcaggacttatgcacccaccatccacccagggctgcagggagttcctggcttctcacagctcttccccaccagaaactgccatgcagtacagagaatagctttgctcaaagaattgcccatttcaaaatgtgtttcatgggcagtgactccctgattgccttaatctgaaagtcatgctttaatttaagaccctgaatatcaaattgaagtgccttctagctgaacgctcaattgtaaaacattcccagtcacacactccacacttctttcctgagaatgtatcctgaaaccctactgcatggaatcctccctctcagagtaggattgcagggaactcaaaaattaaaaacaaacaaacaaaaaacagtctagagggaaaagtattgaagaggagagagagagtgcacaaggagacaactctgaagtctgcaaatattcatgcactgaagagcgcttgtgtgtacagaaactccctctgaaagagaaagacccttgagggaacactccaaagagcgcgcgcgcacgcgcgcgcacacacacacacacacacacacacacacattccagtcacagaggaaaggcctgagttatggggcatgaggtggactcatcagaagagcttcggctcagtattgaggaaaatgtcgccctagacatagggctactctgctctcaactaagaaagtgtagaagcaaactgagaaaagttaagacagtttccaagtaactttactgaatccaaaaataaaagacgaaaatagagaagaaaatgcaaaagaattataaactcaacaaagaaaacttcacaatgattggcattcaatcaacatttcctgcaaggaaaaaagaaaatatatgctctaacacagagaaaaatgaatcaatccaaagtggcaataaaattgtatacgtgatagatagaccttgtatgcaaaaattttggagcaattcttataactcttctccttgctcatgaggatagaggattgattgaaggtgttaagtgaagaaatggaaggcatgaagaaaaatccaagtttaacttttagaaatggtctctaaatatctgcattgaaaaaatgcactgaatgagaatgattgcaggttaggtgctgtgaaagaatagttgagtgaacttgaagacatggcaatggaagctattcaagatgaagtacaaaaaaagtgaagagagcaccagtgaatttcaggacatcttcaagctgacttacttggtataattaaaggcatgaaaggagataacattggtgaggggagaggaaaggtagaaaagccgtttaaaggaatcatggccaaaatttcccaaatttgttgaaagctagaaacctacaactccaaaaatcttaacaagttacacacacacacacacacgcaagtaatacaacaccaatactcatcataatgatattgctaaaaaactatgataaagacatacttttaaaagtagccatagagtaaagacatggtaggtacaggcgaacaacataagaagaagaacagatttcgttttctttgtaaaattttcttcaacatctgggggaacatagtagatatatgtatttgtggaatacatgagatattttgatacaggcatgcaatgtgaaacagtaacatcatggagaattgggtatccatcccctcaagcatttatcctttgtgttacaaactactcaattacagtattttaggtattttaaattgtacaattaagttgttatcgatgtgctatcaaatagtattgacataactctgatgcgctatcaaatagtaggtcttattcattctttctattttatttacccattaagcatccacaaataagagcagatttcttcttagaagtcatgcgagcaggaagctcgcatgtggagctatatttataaaatattaaaagaaaaaacttactacccaaacccatctccagaccatgaatttctctctggatatcttattaaaatattgtctcctatcaaatctctatcaaaataccaatgacattcacagaagcagaaaaaaaattctgtaactggtatggaaccacaaaagcccctgaatagccaagcaataccaaacaaaaaaccccaagatgaatatatcacattatctgaatcaaaatatactacaaattatggtaaccaaaacaggatcaatggtattggcataaaatcagacattgagactaataaaattgtatagaacacaccaaaataaattcatgtatttacatccaactgattttcagcataaattccaagaacatacattgagaaaaggacgcacttttcaataaatggtgctgagaaagtggatacccgtatacagaagaatggaactagacccttgtctctctccgtatacaacaatcaactcaaaatctattaaaaaccccaagtataagacccaaaactataaaacaactaggagggaacgtagaggacatagggaaagttcttcaggacattggtctagacaaaaattccatagctaagacttcaaaaacacaggcaacaacaaaaactagacatatgggacttcattaaactaaaaatcttctgaaaagcaaaggaaacaatcaacagagtgaagacaacttgtagaatgagagaaaatatttgcaaacaattcaactcaaaaggacctaagatccagtataagaaaataagacaaggagctgaaataactcatcagaatagaaaaccagtaatagcattaaaaagtgtacaaatgatatgaatagacttttcacagtcaaagacatacaaaaggccaataggttaattaaaaaatgcccaatatccctaatcaccggggcatgcaaatcaaaacctccatgagatatcatctcatcccagctaggacagctatcattaagaagacaaaaaaataacaaatgctggtgacgatgtagcaaaaatagaagacaaaaccacatggtcatctcagcagtcacatcaaatgttttcatgtaaggaaacattaccatttgctgtttttctagtcttgctagagcaccataaaagataagactagtggtgccaatactgtagaaaatgttattacatgcagagaatctcactatcccataccaaactacatggattcttactgttaaatgctaaaagattacaactctgcatttccaaatgttctggtggtcagagaccacttccttgacaagtgatgagtacggtgatgtgaaaggatagttagcatttacgcaggtattgggtgaagaatagtgatatacacaggaaagctttcaaagagagaaacacatggaggttggaacacagaagagaacataatatgtctgagaaataaagaaagtccagactcactggagctgagtgagaacaagaaaaacggcatgaaccatgtatttcactctggatatctcattaaaatattgtctcctccccaacacaccaccgatgtgaattgtaaaaatgcccgttcttaaattattttttgcacatcatgacagggtcaagcatgtgaatcaagctgagtttgatgagtccaggtctgtctgatgagtccagacccaggtggcctcagaaggacttggtggaacgagggcttgttgtcaaaagtagaggaagtgagattttccattgtggcttagacaagagattcttaaatttcagtggacacacaaggcccctgaggggtctcggtaagatgtagatgcagcctcagcagttctggatgtggccccaaattctctgtgtccagcaactcccaggtgaggctgctgctgctggtcctcccaggaccacactttgaatggcttagctcttattcacccacctcactcaagccacaggtaagactcacacaaggagagcatattctagaagcacaggtcacttctcactcctccccttgtgtcttagatccttttctgttacaacaaagaagtacccaaggctgggtaatttatagagaaaataaaaggtttatttggctcacaattccaatggccacagagttcaagatatggcatctgctcttgttgaagacctcaggctgcttctagtcatggtgaaaggtgaaggggagccagtgtaggcagaggtcaatgggggagaggaagcaagagagaagaggaagatgccaggctcttttaaataaccagctctttcggaaacagtgggaattcactcaccccaagtgaggacattaatctattcatgagagatccactcccatcaccctaaaagctcccattagttcccacctccaacactggggatccaatttcaacatgagatttggaggcgacaaagatcaaagccatagcaccctgaggtttggccacgcacttgctcatctccacatttgtccctcccctcatgactggggtcctgaccactctgactcagtctccctccacttcatggacacctggcagtcggtcatcatctgttttgctgaatcaacagcagtattgggggtattcaacattccacatttgtattgtttgaaaattgcccaatcttaggtgttttgttattgctacacaaacagactaagacatttactatttaatggttacatttcattctctttttatgaaattttgttgctaacagggactttctgcttggtcagaagattaacaattgtgtctcctggttccaccagaaacagagtagagacccacacagctgaggtatggggtcatagattaaaactaagagacataagattgattctcaggctccaagtctggcaagtgagcttctttgagactccctgggatctcagcagtcagactgatcattattgctgtcccaaacatcctatgtgatatggaagtaatatcaaaaccctcctgagattcctgacttgtgtcccgacatgaagtctgttgggattcctgtcattccttcaagattgttcaaataagcagcaacaatcactctcatatgagatatgaaaagaagaattccacatgaaccaaaccctgaagcccacactgaagtctgccaagttatctgcagtccagcgcgatggagggagcattttcgtggggacttttgagagtatggagaaggcctgaggaaacgaggctcagctatgggttccagaaacaaagctctgggatgtctccccatggcctcgacctctcacgtgctacctctcctcactctttgcacagatgctgccccaggctaagcccccacaggaccctaatcctagtcctgaccctgagctcagcccaggtgatatttcaggagatgggaccctgagaatgagccctaaagtctccttatcctgcagcccctgtggtctcttagactcagctacccccagtagagttggccatgagacacctgtcccccacctgctcaggagagagtgcagcaggcaacagtgcagagagaaccagcaggagccaggccaggcgctgcattcagagcagcccccaatccaacagattctccagctctagcctggggtacagcccccaccttctgcgggctgaagtgggcttctcaggatgggcaggccatgatggggattggcagtgtgtccatgggacacagccctactgcctgcctggccctcatgccccctccctccccatcctggttaagcaccaccccaacgggcccagtttcagaactcaggacacctgggccagctcctggacttgcccccactgctctctgttctcctgagccacttagtctcttttggcctcagtgttacctgctgtgaagtgaggagccttatactgaactgaggaagctctttcttcattcaaaattaaaagacagaaaaacaacgaaagtcatgcgaattaaagcctgatgaggggatgtcacttaatgggcttcaatgggcttcagacaaaacttcttgtctttcctctgcagggattccaagaaagggactcaaaaagagcttgctttctgtatggtgggaagagcagtccccagctgagaataagcaggagagtcccagtttaatcaggaagacagactagggtagtgtagaaatcctctcagcacaaactctgagaagtatggaatgaaataaagacaaacaagaaattaatggtgccgacggtggtgatgttagctcacagctaagctgcagaaccagaaacatgcggtgatgggctgagtctcctccaccagctgggggcagcagagctgcagccaggagctttcaggagagaggctggggctgcccagctggggcaaagagaaggccagcctggggttcaacaggtgtccaagaatctgtcttcagactgaaagtgagtgcagttcatcctatcccctcaggcttcagtgaccacgctctgagggtcagacacacggtgtcaccccaggacactgacagaagcctggcacagtgaaggcctcaccagggaaatgcagctggaggaggctgggcccagatgtgagcttgggcagcttcctcaggaaggggaatccctgggaggcgtcccaaggtcgaggtgctctaggagggggtatagtgtgaggtgatggggctcccagggcccgggttcttcacccaggatggcggcctgagcctcctgccactctcagggtgtcatccctcctggtccagcagtgtcctggggagctgagccctctgtcctgggcacttccagatacacccgacccctcctccctctgcctttccttccagctccaggcggactctgactcagggggcagctcctgtactcaggggagtctcgggtgggtgtggtggggcatttgggaccctggccctggatgggcatccccagcctccttcaggagacactcttcagagggacagggcttctcacctgcctcaggccacagctctgaccatggtgctgtccacgctcagtgacaggacactgagcaggggcctggctggagtaaccagggaccacccaatctctggagctcacatgctgtgcagagaccatgaccctgggacccttacagagaccatggacctaacgttagattctcagtccagtgtggttttctgctgctttttgcaagtttacataaaatattgatgagaaaaacatgaataaataacagacaagttgacggtgctgattgctaatctcttgtggcaatgaggggtgatgtagcaggagcagcaccacgactgaaatgagaccagatgccatgttgactccacaggggtgtgtggttgcttaaatgacccaaatattcccactgaataatcagcaagtgtcctaatgacacagcacagcatttagatgaaatgaacaagaggggactgagtctgagggaccaggaggaggaagatcatgggtccctgggccacctgctgctgagtcaggtgtcatcatgatctctccacagagcccagctcagccccatggccaacctcctggaaggtccacagctctgctgagcctggcccaggacagaccccaggtcagcgaggtttgggacagtggtcatgaggttaattcccacaaaggtctatgatcacagggcttgaaggctgcagctgattttctaaccagagaccctgcttgttcctcctgttgcctgtgctgccctcacagctggtttgagagacatctctccaggaagagccacagaggatgtaaatttgcataaacgcttaacactgactgcccccgaaagcctgagagggaataagagaggcctgcggagcccaactgttctgtgggtccaggaggcacagctctgggaatctcaccatggcctggatccctctcctgctccccctcctcactctctgcacaggtgctgaccccaggcccttccccaggctcagtccccacagattccaagttgagcctgacctgaatcctgagcaaagcccagacacagcctctgggtgggactcctggaaatgggtcctttgtcttcaagccccctctcttgttcttccttgcaggctctgaggcctcctatgagctgacacagccaccctcggtgtcagtgtccctaggacagatggccaggatcacctgctctggagaagcattgccaaaaaaatatgcttattggtaccagcagaagccaggccagttccctgtgctggtgatatataaagacagcgagaggccctcagggatccctgagcgattctctggctccagctcagggacaatagtcacattgaccatcagtggagtccaggcagaagacgaggctgactattactgtctatcagcagacagcagtggtacttatcccacagtgacacaaggagacagggaagtgaaacataaacccctccccctctatttcatccccttccttctgccccaggaggactgtggacaaagccatgagcaggcttggccaaattcacccaaatttgaacccccaggctgcccttccctccagccctccaggcaggcgctgcaaaggagtcagtctgcagtggatttgtgcctggcaggcctggcagtcctgtgtttctttgcctggggtttgagttgttgatggagggtctgactggaaagacagacacagggagacatccatgcaggcatgtccagagggatgtggggaactctcaggtctcagttcagtgcagtcattgttgtatcctctgggaaagcattcctccagtgcacctaagacctctagacccacagagcctgaggtcgggatgagagaatgtcaaatttttgctgatggatcactaaaggcatttttgagtggagccactacaatttactccttgattctggactcgtggatcctgactgtgggagaaacagcaccatctattgggcactgatgcacagcacatgccccatcctggaagacattgcccaaccctacacatacttgccacttgcctggtgcagtaatggagtctccatgcagtcattaaaccattcatataagccacatgtctcagaatgttggggacaagagtaagaatcttgaatgccaggagaaaaggcccatagccctttatttgcggtgaaacgagttccttggtcagaacctcctgtggaataccatcgtgatgggtgcatcattctgtaatccagagataacagttttggcagaagcattgctgtcaatgaaagcaaatcctctgtacatgccaatgctagtaaggaaaaagagctgtctctcccatgatggaagagctctaatgaaattaatatcaagcaggcccctggctgttttccacagagaaggtcatcctatagggatgcctgtgttggtctctgctgttgacagattgtcacccagcagtggcttcagccaggccagctccagttagtggaaattcacattgatgagcccattatcagcctctatccctgccaccatggccacatttttttggagtctgttggacaatgacaggagtggttgacggaggctgcctggtgtccatagaacaggtcaccctactcacctgattagcaaaatcacttcattttcacagaagacttagtgagtatttatatatggaaaaaaattctcatgctttttgcccactggaggaggtctactcacacatctctccccctgacatatttgtgatcagtattcctgttgtatctctcccaagttcctgaacatccttgaccatattccaggaccctgagtcacagcccatgaattaggaacctctgcccatctctttgcaggtgacatgagccaattacactgcttaaaattctgctttaaggagaatgttcttccaccactgctgttcagggattctcagaggccaggtggagtactagcaccgttcacaccagtggtggatgcatgtcctgcagaaacatctgtaaccccagcctaattgcctcctactaggcagctgatctcagggagccactctggaggccaaggctgtagggtgagaggaaggcatggtgcagggcttgggtcatgtctgtttggccaactcttcacgcaacttacttggccctcgtaacctaatccctcaagtcacaaatacatccctgccgtgtgattggggagctgcctaaaatggccacccgggactgtgtttcagacgaaatccagcatatcagcaacttgagtctcgtggtgagctctgtggccacaatcacacagagcctctgccaaggctcaggagccctcgcagtctttctcaaatggtgttttctgctcattcaaaacaaaataagtaggggggggggctgctcacgtgcttccagtctgggacactaggaccacctaaaccacacccacgatcttgtctgattattttgattccttgttggctcagttatgcattatggcaaccaaaccacagtgtcattggccataaaatgccaatccttggtccccacctaccctgggatcccctcaaccacatcttgctacccagttaaggtttcagcaacactgagaaaaatgtatttttatattgagagaggaaacattctttcaattgtgaaaaatttataaggcaggaatgtgaaaatattttaaaagacattttacaaagggtgaaagaccctccattaaaccactcaatatatgacactgtaattggcctcccaaaccctgacttcagctctgggttgggaccttctgtaaaggggcctttcatcctcaagccctcctctcctctcctctcctctcctctcctctcctctcctctcctctcctctcctctgctctcctctcctctcagcctgtgcctcctacatacagagacagctgctctcagtcttggtggccctgagactgacaaccatgatcacatgctctggagataaactcaggataaacatacacttaggaaccagcagatgccaggccaggcctcggtgcttgtaatctggtataacagcaagtgaccctcagggacctctgcccaattcttaggctccaaatcaaggaacatggccaccatgaccattagtggggcccaggcccgcgacaaggctgactattactatactgcagataataacagtgggagcagctggcagggactcatagtaacacagagagatagggactagccacagtactgtcccacctcggcctgcctctcattctcacctgccctctgagcagctataggtcaggcctcagggtcaggtgtcctctctggtcttaacctggcccctgaggggctggaggttctgagcagcttctccatcctctcagggcctgcatgtgtccaatgagaagtggacagggtgaaggtggtcagagctgccaggacctttgtcaggtttgtggtgtacatgaacagtttaggaatccacacaaaagcacatggtcccagttgtaatcatacgtcatgcaggggaggagagagctgtcgcagagggcacagtcctgcagaatttctcctttccttgggtaaaaccagctcagtggaagccccaggggctgtgtctcctctggtttccagatgagttgacccccacattctaataggttgcctgatgcctgacaaggactggagacccagccccttttggcctcagggccctttctgtactgatatttctcagaaactgaagaggaagcacagacactacctttggtcccacctgggaactgtgtttggggcacactgacctcccatggcccccaaagtcccatcaccttccccaggtaggtcagtcctgactggatgtgcccccagcgccctgatagtttggagtttatctttgggctctgggctgctttctgaggagctcactaagaaacccttgatgccaggcccaggacctgcgcctctgctgcatgtcccagggctgcaggtgtgaagggagggtcctgctgggtgagggtgatgcccttttccaggagagatgtctgattccagtctctagggccacatttattgggctttcttttctcactaggatgtctcagtctttttatttccttctttaaaagtacaactggtttagggtgacctgctcgggtccccttccacattgtagaagctttgttatttcactcttcacaaaaaatctcgctgctgctcactctttgggtccatgccaccttaaaaaaaaagtacaactggtttaatcatgaaatcatgtgtacacactgaagtttacagattattgccatcagcatatatatatatatatatatatatatatatatatatatactgtttctggttgggacaactgtggacaaggccatactggggtctctgtctctctcgttatcacaagtgaggatactaacagctctcttttatgcagactgtggtcatgtttcccagttgcacacgaatgtctcttatggttgtttagtttccttaccagccaagacccttaagttttcatgcagacaattggatgttatttctctctgacccaacatttttcaaacagtattccttggaacccaacaaaagttccacaagaaaagctcaagtctctggtgcacagttggaccaggttcattgtgtgcagtaggaccttgctcaagtgatgggtccatttgatattttcactatcaaggggaagggtgttacgacttttgggcactgagttgatagagggaagatagcagctgatgatggccctacccaccaatgtgtgtgtgggcagtacctattgatggatttagaagttgagggaactgtttattctgcagatggaatttccagtactgaatctccagcacccagccactagcattcagcaggtgctctgtaagaagaccttcactgccaatcacagccattacacaggtgaaggagaggatgacttttaacagccactgactcacagtaaactgaggtagaaattcagcttcacaaagtgactttgagggaacagactgaggaagcaggttaattattcgctgaaggctttgcccagagcaggaacaatacagggttgatgaggacgtagggatgccctggtgtggaaggaacaaggcctgaaccaggagcaggaagaagcatgggaaagaccacgctgccacatgtgatgagtcagcacatggaaggcacagcaaatgttgcgcaaaggtttttgtgtaataacctggcaaacagctgcttctctatccagattcatgagccaaaaaatgttactgatgcattgctgtcacatgttaaaatgctgggaagcatggtgacattcaaggaaacctgttctctgcaaacacctacccaccggcacaggagacaccccagctatgccaagggctttgtcttcctctggagtaagagcctgggaacaatcaggtggcccctgaaaggggtgccgcgtcttctgctctgcatggctgagttaattggggaactcccagagaacattccagaaaacagtcaacctgtctgtgctgggtgcattgagcatgacccaggatcaatggaagagacagaagcttaatttccttatggctgcaaggtgagcactgggaggacggctgaggcaggttagccaccgcccctgagtggcttcagccccaggcaaacagggacaggtgaagggcctatctgagcgcacctgtatctaaccagtcccagcatcagcaactgcatcctgtggaccacgagggggtgtgtgtgcccagcccctcacagatcacctgagcataaacaggaaattctccaccttacacccgactgcacaacacatctgcctccagctcttcatttacaaggtgatatcacatcagacagggactgatctgggtcccagatccctcaggtttccgctatcctttccagtccccacacagagcagactcttcactgcagggtgttgagccagctcttcccctcacaatgcctgttacaggtttacaagttactgttctccaatatgattggggtttgtttcactgtttctctatatatatatatttgcattttcttgggtaagctgagccccttgtacctggtcttgagtcaggcaggggccacacagagaagaggacttcctcccctggcaccagccgtccacagatcagggcatcaaggacctgagcagcaggttctgaatccacacctagaccccggaagtccctgagctcccagccgacagtgtggagcagccaccagggggaagcagagaatcaactggcaaagcgacctggggatggggcaggcctgggtgatagggagatgctgacatgcagtaagagccagtgaccaccacctcagatttagagggaaagggtctttattgtcctagagtattgtccttgacactgatgtaaaaattctagaatcacattttgtcttcagctcttttgcatgctgactctttgtctgacacagatccaggcacttgacttctcacaacgccccctcctccacacccagttgtgctaaaactgcatccccctcatgtgcagtgtcctctctgaggtcacaggtatccccctactcccatttgatctgggaacccctgtcctgcagacatagtggctggcttctaacttcctagctgcccctccacatccaccgtccctggtctttcccgactctctcctggggaagctgccaaatcacagctcttgatttcctggtgagtcacaaaatagttgctcattaacctttagttgacttaagttcttatccattgatacattttccccagcaactggagacatcatatttataataaacattcacttctggggatcttggagtttgcagccccctctcattctctcatggagcaaacatttccttcacctcctcatctgtccctggtcctgacagcatcctggagatactgaggcacagcagcaatgacctacctagaagctcacagccaaggcagaaacttccagcatctcatggatcttccaacactctgtgcgcacttggcaaataaggaatttcattgacctctatcactcagaggttgtgggctgtggtgggacccgcacctgtccaaggtgtgcattatcacctgtacagtggagacgaagagggaacttgcattgggttctggaaagtactgtctaaaaatagatttagacctacaccagaaatgtcctctctaacataaaatatttatgataggacacattagaggcctagaccaaaatgaaatacctccctccagagccaagatagaatggaggaggggactggggaccccagataattccacagttaccagcatgactctatggtcacctcccagaccaggtcaaaacccatcccataggagggacttcatattcctttgtaaatacagacaaagtcacctctgagctctgctgtgaccaagggagcccaggagtgaggctgagcacagtgtgatgtggggatgtgtgcagagaatatggaatcaattcataaaggagatcctgtgggcaaagggtgggagggcaaggtcacccctaacctctttgggtcccttggggctgtgcccttctcgaaatcacaaggctcctccagcagcagcccctgactctgctgattggcatcatggacccttctctccaacaaggggttgagagacctgggaggagcctgcccagcctcagacttgagaagcagcattggaggcacttcagccatggcctggcccctcttttccttggtctcctgactcactgcacaggtgctgcccccagggtctcacccacctgcccagccccaggcctccaggttcagcctggccgtcagtctgagctcagcagggccctgtgtgtggtgggcaggatgctcgtgaccctgctgcagggggaggggctggttggggtgaaatgcccccactctgtgctcctgtgctcataggtgccctgagagctcttttattcctggggctcactccagccctggcaagtagccagatatccttgggttgagaccctcagtttcaagttttttctgtccccttttctttccttgtaggctctgtcacctatgagctgacacagtcaccctcagcgtcagtggccccaggacagatgaccaggatcacctgtggggaaagcagtattggaagtaaaagtgctcaatggtaccagcagaagccagccaggcccgtgtgtgggtcatctatggggatagcgggcggccttcagggatctctgagagattctctggctccaacttggggaacgtggccaccctgaccatcaacaggacccagggtggggacaaggctattactgtaagatgtgggacattagcactcctcatcccacagtgacacagggagatgaaggagcaaaacacaaaaacctcttccattggtgtcactcttgtcctccagcccaggaagacagtggacaaagccatgagtgtgtgttgcccagttaacctggatgtgagacccccaggctgccctttccacaggccctccaggcaggctctgcagagggggcatcaagagtgaatttagggctgagatgaccaggatatattgaggtgtggaggaatcagttgtgatttggggaagtggggcctggttggaagatcagaccaaggtcgacatgcttagttgggctctggatttccatagggggtgaaggctagtccttgggctgaatatcctgagtcagtttccagaactgcccagctcacgttcccgtggcatcctgccattctcttcaggaaaaccagtggagtggacactgtgggatccacccatattccctcttctgagctcacccacccagcactgctggtagctctggcagctcagagctgtgccctcactgagaagggctgtcagcagagaaaactgtctcctccaggtttatgccccttcttagcaaggtgtggtttcataactgcctgaggtgaagctctcaagactccctttcaatatgggagaaacagaaaatcctcccagcttcacagctccttattgggatggtagaagactcaatgtgggtcagagtgtccttgtgcccggtgttgcctccctcacttagtttcacacctactgtgaaagcaaagctccatctcagagtctgcttccaggcatcccaaaataacataaccagtcatcccgaacgtgagccatcaggaacctcaggaggccacagtataccagaaagcaccagtttattcctaatgatcattgtgagtttgcaaatgcccaatgagatctgagtgtttcttgcatttgtatggaatgaaaagggccctggcatgccaggcactgtggggtctgagggagagttggagtcagatctccctgcagggaaacctggggcaggaggagcagcctcatcccatgcagggaccacagatgcacctgcagggtgagctgcaggatggacactgcccacctccaccctccacattctgtgcaaaaaatcattctttccacccctccttcagcctatcaaagttgacacttaaaaagccaccacagcccacccttgtcaacaggaaacccattcacatctccatcagccacacaatctccacataaagattcttcaaaaaataataacacttgccatgcaaagtatatatataagatgtctcaaataattgtacttagattgcatatgaaagtgatactattttgatatgctaggtaaataaagtaaattatttaactcatttacttcttccctttgtatttttaatgcgatgactagacattcagatttccatgaggctcacatcatattgtgaatgaacagtgctggtctgcaccccttcaggttacagtggctgaggagtgacctggtgcaggaagccccatctccatccataggacattggtgtgaacccagggagaggcgctggtgtaagagagatgagaacacaggtgtgaaccacctgcttgtgcaggggactgagccttcactttgagccaaacaagcttcttttcctatcttcaatcctgagcaagaggactttccggacttctttttgttttcaggtttgtgcccctccaggcctgaggctgtctggatcccagccaggggacacagaggaaatccagaagtctcacaccgaccctgttgtatttcatctgctggggccatcccaaactgctgcgtaccatttcctttcctggtgctcaaatagctgctctatgcacttgtcatggtttcagagatgactctaggtgggaagacaggataatgtatgttattatatttaaaaggaacttaaattcattaatatttattttaatatgaatcattaaaaaaatttgtcataggcaatggggaaggaggaaaagatattaaaattattttgaggaaaaaaccaaaattgtatttctcgaatgtctgagtgtcttcagtgtctcagggttgacagcggtcagctttaggttgtcctgaggatgtactccattgggggaaagcaagaaagcatgaaacacacatctctgtgacctgacacataaatcacagtaaaatggaagtaaatcttttaataaatcaaacactcacaataaatatcactctggtgaacacagaaatgcctgttaacaaactttccctttcccctgctggctcatatccccatggatcacctgtgtgcagagtggactctgtggtccccatttctcaggctgagaaccagaggctgggaaggacaagtcacctgcttgtgagtggcaggggaaggattgggagcagtggactcggtctcaggactgcggccctcaggaccaatgccacctagcagaggtttccacggggcgggctgccccatttcctgacagtagggacaacctggaggtgggtgccaagcagagggcactgcagggtgtgcccaggcctggagggtcacagagacacaggcaccacacagcagagacactgagggccagaagatcactcaggtaagggacttcagcagatctttctcctgagcaaatcaggtacaaaaaaattaagatcctgccatcagaatagataaacaaggactttaatctcagctgagctccactatccaaggaagcagaagcctctgagcccaggcccaggtgagggtggggtgaagggaggagctcaaggtggagatttgcatgcaggccccaccctcctctttggcagaggagataagacagggctgggggcaggcccagtgctggggtctcaggaggcagcgctctcaggacatctccaccatggcctgggctctgctgctcctcaccctcctcactcagggcacaggtgacgcctccagggaaggggcttcagggacctctgggctgatccttggtctcctgctcctcaggctcaccggggcccagcactgactcactggcatgtgtttctccctctttccagggtcctgggcccagtctgccctgactcagcctgcctccgtgtctgggtctcctggacagtcgatcaccatctcctgcactggaaccagcagtgacgttggtggttataactatgtctcctggtaccaacagcacccaggcaaagcccccaaactcatgatttatgaggtcagtaatcggccctcaggggtttctaatcgcttctctggctccaagtctggcaacacggcctccctgaccatctctgggctccaggctgaggacgaggctgattattactgcagctcatatacaagcagcagcactctccacagtggtccaagttcctggggaactgagaccaaaacctgccctgggctctcaggccccctccttgctctgaagatgcttcctcacccagtgcaagcggcttcctgcagtgcggccttgagaattcttctctctcagctccttccctttccaccatgaattccaaaaggaaacccgctctgtggtttctcatccaggacagggacagcttcctgatgcttgtgtgccgtggtccctgaatgtgcaactcttgttagctcttcaaatgcagggacagtgacaaggagcttcctgattgatgcagtcactgcttttttcagggatgtcttcaccctacatgcatcaccatctcccacactgtgggtagaattttagcaactacattctgatggttatcgccacaactttgatcttaaataacaatgcagcgaacatccctgtgcagcctcctttgagttcctgtgtgaatatgaccacaggattcatttctaaaagtgaaattgagggtcagaaagatgtgtgtgtgtaattttcacccgttgttgtcagattcccctccagagggattctaccaattttcaatgccagccggaagtacttgttcagagtacattgttgaaagtggaagtttttgccaacctgtcagactcaaaaatgatacctgttatggttttatttttgagtctcctgttctgcttaagtttgggccttttcagaaatagttcagtactttttcttttttaggatttgggaaactttttcttaaatatccagataagaagaattttaatcttcgtggccggacaccgtggctcacgcctgtaatcccaagtgtgttggaagggtaggatgggtcaattgcttgctcccaggagttgagattagtccgggccacacagtgaactctcatctctattaaattaaagaacataaaaataaattttaaaaggaagtattttagtctttgtggctcaagaatcaactttggggatattccataggtatgtatagcatcatttacaatgtaaccatttaaaatgataaaagccactgtcagctctaggccatacaaaaacaggtgtcaggccagggatggccacaggatgtggttgaacagtccctggtttgtagggttatctgagggttgaaaattccaccagaatatgatctaggtgggaatctctctgtgagggtcactgtatttcacctcctgtattagcctgaggtctttcattggataagaacatgctcacatcatctatttgattgtatcatgggtttaagacaaccccgtgtcacaatcacataacatttatctgcattgcttgctccgagttttgggagagctttaatttatcaggaatagactcctcctaaggcaaaagtctgagagagagggatgggcatgtgggcaagatagtttgtaccaaagctggaatatccagggcaggctcagagagaaggttactaatatcagcatttgactgcagccaaaaacagaagagaacatggaggttctgagaatgacaaataaacaaatagtttaagttttaaatgtattgaatgtttttataatccatgaaaattctagaacagaatttaacaatgggataaggaagagagcttgagatgttaaaactataaagaccccaagccaagctgccaggaaaagaacaggatctttttggtggaaatatgtttctgctgcaaattattattttatgtgtgtgtgtgtgtgtgtgtgtgtgtgtgtgtgtgtgtgtgtgtgtgtgtaaggaaacctcccatggaacatccttcttccctacagtcaagatcaccctcaccctacaagggaacctaaacaaaatgtcaatatcaaatagaaaaaaataatgcactttgtataaccattagagagtctctatttgcacatcaaaatgtggatgcttaacgttaacattggaaatagtattttaatatgcatatgagatgaattttctttagactatttttgtgaattatctttcttaataaggacatactcttctcttagaacaatttaacttgtgatattttttctattttctgtatcagttctgttttttctaaacactggcaaagatatcctatggctactgattaataaattagattaatgtgtatttaacttaggtaagttagttcaagagtggacagatgtgatttccccacatatcctatggctactgattaataaattcaattaatgggtatttaacttaggtaagttagttcaagagtggacagatgtgatttccccacatatcctatggctactgattaataaattcaattaatgggtatttaacttaggtaagttagttcaagagtggacagatgtgatttctccacatatacctcacagatgttgctggtgcttactcactcttctcttctaatcttagcaaataaagtgggaaatttgacattcctaaacacccagatgacaacaggagagaggaggtgaagccccaaagctgttattctttaaatcctcaggatgaatcaccctggagaatcacccacacttcagttggatgatacgcaaatgagagtttggtcttagagtggtgctgagttagttcaggatttgggtcactgggatggggtgaatgtgttttacaagtgaaaaatacatgagttttggggtctgcagggtagagagttcttggctgaattgtgtcccccagatctgggttgagtgacatcccaccaagaggagtccaggagaagtaaatttgtgtaaacaccaaacatgcactgccccactaggcctgagaggaaataagcgaggcctgggaagcccacctgtgctttgggttcaggaggcagagctctgggtgtcttaccatggcctggaccccctctctgcctctccttcctcaccctctacaaaggtgatgcccccaaccctgccttaggctcagcccttacaggatcctgagctggtcctgccctgaaccctgagctcagcctaggcatagcctcagggtgacaccactggaaatgtgtttgttatcttcaagccccctctcctttcctctcctgcaggctctgtggcctcctatgagctgacacagccacccgcggtgtcagtgtccccaggacagacagccaggatcagctgctctggagatgtactgagggataattatgctgactggtacccgcaaaagccaggccaggcccctgtgctggtgatatataaagatggtgagcggccctctggaatccctgagcgattctctgggtccacctcagggaacacaaccgccctgaccattagcagggtcctgaccaaaggcggggctgactattactgtttttctggtgattagaacaatctcacagtgacacaggcagatggggaagtgagacacaaatccatttttcatctgtctcatcttttcctccagcaccaggatgactgtgggccaagccatgagcaggtctggccaagttctactggatatgagacctccaggccatccttttgttcagccctacaggttggtgctgcagagggtagagcaggagtggatttagggctgctataatcagaattttcttgtgttttcaggcccctgaagtgacttggggaaataagaacgggatggaagatgagagagatgtagagaacaatcacttggccttagatttccatacgatggtgattgggtcactccttccaaatatcttacatcagtccccaaaaatgcccagctcagctcaacacctgagcttccaggcttccatggcagcctgggattttgaacaggaaaagcagaggaacaggaaaagcactgtggcatctgcctagatatgcttttctgagctcacccaccctcaactgctgggagcttctagaagcttagagctgtgccctcacaggaaagtgctattgtttccagaaaacttcctttctcatatttaggctcagttttgagagttttggtttgatgactgcctgagccaagaacccaaggccccgccttaatacaggatgacactgaaaggccttccagctccagacctcccattgtggatgcctgaggcctcagttgcaatcttatgatgggtcagggtctccttctggtgggtgatgcttctctcactcctttcagattctctgtgcatgaaaatgtttatctcaaagtctactttcagggaacccaaactaagacggccagctgtcaccaaaatgagccaccatagacctgaggtggccactataccctggaatgcatcagcgaatttcctaaatttccactgtgagcatccaaatgcccaacgatttctgagagatccttgtattcttataaaatgaaaagggatcctgaaatgccaggtgctctgagtcctgaaggagaggtggaggcagatcttcctgcaaggattccacggaaaagggagcagcctcactccatgcagggaccagagatgctcccacgggggcagctgtaggatggatgctgcccacctccatcctgcacatcctgcacaaacaatcactctttcacccctccttcagcttatcaaagttgacacttacgaagccagcacagctcatccttgtcagactccttcaaacctccatcaaccacacaatctcaacataaagaatctccccaaaataataatagtaacaaaataataataataataaaataatagtaacaaaatagtaatagtaatagtaatagattttcaggcacagaaatagtaatatagtagctatgaaaacttctataaaaatctcataaataattttagattgtgtgcatgtgtaaatattatttttcacactttgtgttaaataaagtatattattgaacctagtttacctttttattttttatgtctactatggtgactagacaataggattcacatgagactcacatcatgttgtgattgtacaatgctgatctggtcttaccccttcacatgacaggtgctttggagtaacctgcttcagcaagccccatctccacccataggacatatgtgtgaagccacggagaggcactggtggaagagaaataagaatatgggtgtggaccagctgtttatgcaggtgactgagtgctggagccctgaccctgctctaacctagatgtgtcacatccatctcaccagagaccactcctggcctgcctgagctcacaactggggggaaatcgcatttctggcaacatggtcacttgatgtccagtgttatcctgtctctcccagggcccagtaagacaaaagaagctgtttttagaaaggggagtaacactctactgcacatgacatggccttcttccaaaaacccaggagtctacattgggattctccaacggggtttgccatgtgcaggaggttttatttcccatggtggagtctgctggattctctggccccaacagcaggacactcacaaccctgcctgcacctgctgcagagccttcctgctctgggcctggaaaacaatgggtgacatttatggctcctgatacatggattggagtcacatccccagtagtaaaatatgctactcctagatcttataggccttgtgtctctttcttcctggggaaaattgaaggttataataacatcttttttttttttttttttttttaagatggagtctcgctctgtagcccaggctggagtgcagtggcccgatcttggctcactgcaagctccacctcccagattcacaccgttctcctgcctcagcctccctagtagctgggactacaggcacgcgccaccgcacccggctaatttttttgtatttttttattttagtagagatgagttttcaccgtgttagccaggatggtctcaatctcctgacctcgtgatctgcccgcttcggcctcccaaagtgctgggattacaggtgtgagccaccgcgctcggccataacgtgttgtttattttgtaggagactctcagctgctccagacaactaaagtcccaatttcagctaatatggaggaggaaacatctttgtttatttcccactctcaaaagtgcatggatctcacaaaagcttccaataggccgtgcccatcatgtacatgtgattgaactatgatatccagatggtctgagcccccatgatgatatcatgatagggaagggagagctaatgaagctgggcagaaaaagtgtgaatgtatactgttgtccattccacgtgaatgcacactgattctgatcctattctctgaggacaatagacaagacctcagtatctgcttcagtggtttaactgtgcacctgcagccatagcattctgttccaggagatccccatctggcacagatattgctaatgccactattgcccatctgggtctgtacaaatccaaattcatcttccaggatcattcaactattgtagagatcagtccagtaaactgaaagtgaggaccccagaagtaatcacacgtactgcaggagaggagagagctgtttcagaggccacaatcctgttgaaattcctctgctccttgggaagaaacagcccagaaaaggccccaggggctgcgtctcatctgggttcctggatgaggcacaccccctactgcactgagattccacagaagctgggggtgaagtgcaaacaccgtctttggttcatccttgggattttctttttatcacacactcgtcattttgtccacaatgtccaaagtttctaaagtgctgtctaatagatagaggttctttgtgcgctgaactaaaagctcttgggttggctaatggtgatgtttgcacatttttactgtacttactgccgcttaattacacacttaaaaatgattaaaaggatgaaacattttgttatgtttattttaccataataaaaatattgcatgctcaggaagcaaagtaatactagtttaattttgaaatcacacaactggtaaaaatggaaagaaaagcaccattttctctgttctatatgctacaactcaactttctctctctctctctttctctaattaacaatgatatcctgtctggtccaaggtcacacatttccagtgttgcaggaatgtctgttgaatctgctaatttgttgccaggaagaatactcaaacttctcatgctcatatttgattgtcaactgtctccagccaacatttctaaaccaggatcctttgacaagacttgtgaagaattttgtaaaaagtaccccccaagatgacagtgttcgctgttggcagcaggactgtttccacgcagtagggctatgctgggtgtgcagtggagctgtgcacactgtgctcacggggcagattctgtgctgctgactctgatccctgtgcttgggaggaccgtgtccactgctgagtctacatctgaatttgattctcaagaaaaaggtcattcatagctgctggacactgagtcacacagagagacagaaggtggctgaggacaccttatctctgatgagaataaggggattagatctgctggtggaacaggaagctgaagaaacttctggctctaaacatggaatttccagccctctgtctctgctgtccatgcccttctcatctgtatgttcctgggagatgtggaccacgggggtcagaggtgaaggggattgggaagctttcatgttctctctcaccatctcccttgtttatctaacacactcttacacacctactttattagagcttctgctctacaaacatggctgagctctaaattagagacttttgaaagtgcagacggatgcaggaactcgtccatctggagactttccaccacttgaagcagtgaacacatctctgcaaggctccaaatttcaagtgacaggattttgggatttcaaagaaaactaaatctttggtgaaccacgacagaagagggaaggttcacacatttccctgctgcttgggcctcagtgaggactgactcagccagtctcaggctcctggaaacctcctaggagatgtgcactaggaaagtcttttcagtacaacctggggcaggtaagtggcccttactctgatattctgctccctgataattttgctttcagagaagaacaaagacctgtgattctgggaagttcaaagcccccagacaaggtcttctcattctcccgtgacagcctgagctctgcattcccaaaaggaggagcatcttcccggcatgaagagccaggagtagagagggagcttctcccaggggtgagcagggcagaagccaccttggtcagtgggaaggaaacgtgctcagctcacatctgacccagaatgactcagtcacacccgtgcagggtcacctgcatgtgagcatcatctatttgctccatgagaaaataccttgtgtgactcttgggtaaaatcataccgtaggtgacatttctctggctattgcttcagccaatgtttttcaaaattcactgtaggacacttacataaggtaagcatgtcaggtgtgggatgtgttgaataggaaaagcacaggcttcctgtatcaatgttcatggcttgtattcatggccataactcgtggaaatggaaaaaaaaaaaaaacagaaaagaaaatgataccctgctcaaaaaagcactgagaaataccattgtagtaatatatcttcaacttataagttgagctaattgaacattaacttagatagatcatttttatggggggattcctaaacctaaaacattgtattaaaaattttgtcaggttaaaagatcattaaaaggccaatgtttgattaaaatctggagtcttttactttgggctgcaatcagccaatgagtgcatggagttggctgccctcccagaccctgactggctccacgtcgaggtagagcagcgctcccgacaggcagctggaggaactgacgaggggaagctgtttgcatcagggcctcaaaaatttggctcaggattttcccacgtcccctccccaagcccaagctggtcccaggacactcagaagagctcatcattatgggtctaaaacttctctgatctcgctcttctttcttccttccccagagaccttggaattgtcagtccctctcacaggcccttcctttccttgtcaagtgcactccctgaattatctgctcctgggtcagcaattctctagaacttcagggaaagcagtgctgggtcacccacatggggccccagaaagctggctaaggaccagacacacaggcagcaggctaggtccccacagggctgcatggttggcatcgggtagaggggagggaccaggaaccactcgctgagtgtccgtagggccaggtgaactagggaagggctggaacctggtcaaagaattgtgtactaagcaccactttctctgttctatatgctacaactcaactttctctctctctctcttctctaattaacaatgatatcctgtctggtccaaggtcacacatttccagtgttgcaggaatgtctgttgaatctgctaatttgttgctgggaagaatactcaaatttctcatgctcatatttgattgtcaactgtctccagccagcatttctaaaccaggatcctttgacaagacttgtgaagaattttgtaaaaagtagcccccaggatgtcagtgttcactgttggcagcaggactgtttccacgcagtagggctactgcaagccacacctgtccccacacagtagcatcttcctggaggtcaagagtgattttgtttgctatgctgccccagatcacctaatttattacctgtgaatttcacacactacacatcctgcctgtccccaaattcttcacttatgggcaaatgtcacatctgacctgaactggtttacatcccagatccccttcaggcttcccactgtcctttcagatcctcacacacccaagacccttctccgcagggcacagacacagctccctgcacacgcttccatcacttgtctcttcactccttcctcaaaggaactccacagactcttcttcagggaggccttctccaatcactgaagctacagcagccagccagtcagcttctgtcagaactttcaatgattagctgcatagagcttacaattacacatttgttttttctatcgttatcttttgactgatttatttctattaatcattgcattatcagtcagaaatgctttttcactacaagaacacatgtggcaggaaccagggagcttccaattttcttccacaaaaataagtctgcacgtgcttggtggttgttttccagatgctctccagttccataggaagctcaaatatttctacctctccattccctttcaatgagatgttgactttgttttcattgttgttgatgtaagacctcagcatggctgctgcagctccagctatcacacccaagttcaagagaaaaagcaaagcacaaacccaatctagtccttccttcataagaggaaaagtttcctgagaagaatctcagccatctgactcttacatcctatggaccaacgctgggctacatggtcactgctggctagaagaaactggaaatttgcctgactttcaagtgaatagaggggatgacacacaagtagaaggtggtagggagtatctgctgggtctgtaaacccaatctgcctactgcactgatccagcaacaggacaggaaactcctcagagcaaggactgtgtcttcctcatgctgaattcctaaaatgcattcttgccaggacagagtgggtcagggtgaatatttgttgggtgaatgagcttctgtctctgttgtattgcaggagtcaccaccagtgcacattggccctgtatttgtatccagaaccaatcaaagccacccctgagtcctgcatctctcagtaccaagctccagtcccccttcaagaccacccaccacacagacgtgcagggagcctcaggagggcactgtcacctccttctccacatgtgagtgtttgtatttccatcaggaatctgagcacctcgtgcccaggtttgaggcaggaaggggccacaaacagaagagaaatttcttctctgaagtcaacagtccatgaatcaaggaatcagggacctgagcagcagattctgaagctacacctgaacccaggaggcccctgagcctccagctgacagtgtagagtggccacctgggggcagcagagagtaacctggcaaaaatccctggaaagggggtggagctgggcatcagggagatgctgacatgcagggagggtcagtgaccatgacctgagacctggagggaaagaggttcctcttttcttagaatatttgtcattgacactgatgtttaaattcttctgacctcctgtctctcagatttgactcttggaaatggtgcttatttttctgatacagattcagacaatttgcctcttctcattgccctggcccccatctcactgtcacacatgccattccattctgtagtcacgcgtgtcccacctccctgcccttttctctggtagctcgtcctgcagacacaggggcttctccttccctggccactcctccacgtccactgtccccagtctttcccaacactgtcctggggaacctgccaaatcacagctcttgatttccttatgaggcacaaaatacttgctccttaatcttttgttgacttaagtttttatccattgatatattttcccagcaagtgaagacaacttagttataataaacattcacctccagggtcttggagtttgcagccccctctcattctctcacaaagccaacatttccttcacctcctgatgtgtccctggccctgacagcaccctggggatactgaggcacagcacctatgacctggcattagaactcacagccaagtagaaacttatcacatcccatggatcttccaaaactctgtgtgcacttggcaaccaagaattgcattctcctctagcactgaggggctgtgccctggggtggggcctgtactggtgcaaggcttgtgctgtcccctgtagagtgggaagtaaaaggtccctgcattgggttctggattgtgtcttcaaaatgaatttaggcctataccaaacatctcatgtctgacataaaatatttatgaccaggacatttctagagaagcagaagaaagttaaccacctccctcctgagccaggatggaatggaggaggggactgtggaccccagataattcccccatcaccactgtgactctggtaacctcttgaacagggccaaccactatcccataggaaggactttatatcccctagaaaatacagagaaactcagctctgagtttttccatgaccaactcagcccaggggcaaaagtgggcacaatctgggtaaagatgtgaactcagaccatgggaccagtgggtggaggagaatcccatgggctgagggggtgggcaagcagtggtcaccccttttctctctctctctgtgtcccttgggactgagcccttctctggaaaccacaaagctcctccagcagcaacccctgactctgctggtttgcatcatgggctgttctctccagcaaggggataagagaggtctgggaggaacctgcctagcctgggcctcaggaagcagcatcagcagtgcctcagccatggcctggacccctctcctcctcagcctcctcgctcactgcacaggtgctctgcccagggtatcaccaacctgcccatccccagggctctgggtccagtgtggccatgactatgagctcaggagggccctgcctgtggtgggcaggatgctcatgaccctgctgcagggtgagggactggcggagctgaagtcccctcaaactctgctcagaggcttgtgagagcctgaggggctgcacctgccaggagagagtactgggttttcagttcaaaggctccatgcagagggaaagtccatgggccactggggctagggctgattgcaggggataccctgagggttcacagactctctgaagcttttccaggacagcagggcaggggatttcatacggatcttttacctaaaagccatcctctcctttttttttttttttaatctttgcaggctctgcgacctcctatgagctgactcagccacactcagtgtcagtggccacagcacagatggccaggatcacctgtgggggaaacaacattggaagtaaagctgtgcactggtaccagcaaaagccaggccaggaccctgtgctggtcatctatagcgatagcaaccggccctcagggatccctgagcgattctctggctccaacccagggaacaccgccaccctaaccatcagcaggatcgaggctggggatgaggctgactattactgtcaggtgtgggacagtagtagtgatcatcccacggtgacacaggcagatggggaagtgagacaaaaacaccctcccagcctcggtcaccctcttgctccagccccgggaggcctatggatagagccatgagtgaatctggtccagttcacctggatctgagcctcccaggccgcccttccctccagccccctccaggagtctctatagagcatacatcaggcatacacatggcctggaaggaccagaatcatctaatgacttggggctgtcgtgtgagttagagaatgagggcctgggtggaaagacagacagaagcaacctctgtcctctgtcttacccctggatggtaatggggtggggatgaggccagtccttagaccagctatctggctcagtccccagaaccaaccctgctgaggtcctggcccccaggctgtgtggcagtctgtgattcccaacagaccaaaccagaggaggggacactgtgaagtctgcccaggtcccctcttcaatgtgacccacctagcactgctgagaagcccagcagctcagagctgtgcccacaatgggaagcgctgttggttgcagaaagcttcctcaagtttatgtcctttctcagatggttttggtttaatcaaccaagatctcaagtccctgccttaatgtaagatgccactgaatgaagggcctcccagctccagagctccctgtgtggacggacacctgaggcctcagtggcaaccccattatgagtcagggtctccttctgcccactgttgcctccctcactctcttccaaatcttctgtgcatggaaatcattgcagtcaccttccagggaaccccatctaagatggccagctgtccccaacatgggctgtcagcgacccgaggagtccactatccactgaaaattctggtttctgtcctaaattttcagagtacatgttcaaatggccaatctgatggttccttgaatttttatggaatgaaaagggagcctgacatgctctaggttgagagatagttggagtcagatctccctgcagggaaacctggggcaggcagagcatcctcgccccacgcagggaccacagatgcacccacagggtgagctgcaggatggacactgcccatctccgccttccacatcttctccaaatgtcacccctttctacaaccccaacccaaatcattgatctccagaaaaataacagtaacaatagccatgaaaatctatgtaattcatctcataatttcatgttaacatgtgaaaatgatagtattttgctttattgacataaataaaatatactatttatccaattttatttgtcttatatttttatatttaatgtggtgaccagacactaggggtcacaggaggatcgtgtcatactgttatgggacagagctggtcaggactctttcaggtgacaggtgctgttgagtaacctggtgcaggaagccccatctccaccagacccaggtgtgaacccaggaagaggcgctggaacaatggagaggagaacctgcttctgcggaatacagtgcccttgagccctgcccctgctccatcctacgtgtgccacctccatctcaatgtggatcatttcttgccctgcctgaggtcatgactgaggggatctggcaggtctggctgtgtggccactgctgtctcatgtggttctggttgtaacaaagcccaggaacatagaagaggctgttttcaaaaggtaaataataatctactgcacatgacatagacttgttgctaaatcccatgggtctacagtaggattctcctgttgaggtttgccttaagcagaaggtttcagttcctttgtccagttcctctattatgatagggtctgcagtttctctggcccaatagcaggacactcacacccccgcctgcacctgctgcagagcctttctgctcttggccccaaaacaacgggtgacacagttctcagacccatgatttatggtgtcagtattcaggcctcgggggtccctgacggcttctctggctccaagtctggaaacacagcctccatgaccatctctgggttccaggctgaggatgaggctgattattactgcagctcacataggagaggtggcactttccacagtggtccaggttcatggggaattgagacccaaacctgccctgggctctcagcctctctcttgttctgaagatgcttcctcaccctgtgcaagtggcttcttgcagcaccaccttgagaatttcccctctcccagctcctctcctttctcaccaggaagtccaaaaggaaacctgctctgtgatttctcatccaggacagtgacagcttcctgttgcttgtgtgttgtggtccatgaatgtgcaactcttcctagctcttcaaatgcaggcacatagtgagaaaagctgcctgactcatgaagtcattgctgtttttaggggcgccctcaccctaaatgcatcctcatctcccacgctgtgcaggccaatctgcacagaagtcattacagggagtttcaagaaattgcaccttagtcaactctgtgtccactatgctctcgtgaagatggccctcctggctgggctattcctctgtacctctgtcctgaagcagtgaccactgtgagagctgagcatgtttttgagggattaagaaccagaggaagctgttgtttttcattattattattattattattattattattattttgagacagagtctcgctctgtcaccaggctggagtgcagtggcacaatcttggctcaccgtaacttcagcttcccaggttcaagcaattctccctgccttagactcctcagtagctgggattacaggtgcccaccaccatgcctggctaatttttgtatatttggtagaaacggggtttcgtcatgttggccaggctggtcttgaacttctgacctcaggtgatccacccgccttggcctccgaagtggtgggaatacacacgtgcgccaccacacctggctgcgtttttcttatttttgttcctcttctttgcctcaatacctcaggttgctgagctggggagattttgagtgacagactcagtattctctcaaaatccccctctctcacatcgctgaggccctgtcctggaaactctccaaaagtggatggtctccctataggatgggagcttccaaaatggctccacagggaagagttaacctgagttcattccttcctcctcattgacatccagcatttgtaatttccatggccatcaatactactatagctgaaatcttcattaatctactaaaggtgagagtgaatttcatacatattcaaacattagtttcatccaacatttaaattttatgagtcaattggtaaacatagccatgattacatgtagtttaggcttcataaactttgattaaatggattttatttaaaacaatgtaatcattttactatatgtgtatcctacctatatcaacatgttgttacttgaaatatccacaagaaactatatttcaaaaaccaaattgtatttattgtctattgttacataaaaattgctccctaatagttagcatattaagagaacacgtgtttgtgatcttgtcactttggtgcatctggaattgagagcagcttagttttgtggttctggccctgggttggtcatgaagtcgcagccaagctgtcaggccaggctgcattcagaggccagagcaggtggccaggcccagcctgaggggcttccactgtccctaacctgtttggctgattggaaaactcagcggaaaaggagagagtgaagtgtaaggtgcctgtcctggtcccccatgtcaaagaccattccatacatgcaccatttcttattctttcctgcaacatcctaggcatagagcactgcccattcattctaaggctgtagagtattccacagtagaattttagccatgcaacctctaatggttaacaccatgattttgatcttacaaataacactgcagcaagcatccttatgccgactcctttgagttattgtgtgcatatgatcataggataaattttcagaagtggaattactgggtcaaaatgatgtgcatttgtaatgtttacccattgttttcacatgtttcaccagtttacaatgccagccctaaatattgattggaattcattggtgaaagtgcaaatttttgccaacctatcagatataaaaaagttaccttgttacacttttatttttgatttctcctattgtgcttgaagttgagcatttgctcaaatgtttcagtgctcattactttttaaaattcggtaaactttttcttaaatgtataaataagaagtattttagtctttgccacacaggagtcaactttggggatactatgtaggtactgacagcaccatctgcaatgtaaacattaaaatatataaaaaccattttaacccattaaccatccccagataatagctgatttcttattagaagtaatgcaagccagagtcagtggagttatatttagaaaatattaaatgaaaaaacttactacccaaagcaatctacaaactcaatgcaattcctttcaaaataccaatgacattattcacagaaatttaaaaaaacctctaaaattggtataaaaccaagaaagatcctgaatagccaaagcaatactgagcaaaatgaacacagctaaagatgtcacactactagaattaaaatatactacaaactatagtaaccaaaacaggaaggtaggtattggcaatcagacactgagaccaatataacagaatagacaacccagaaataaacccatctatcatatagagccaatcgattttcaacaaagatgccaagaacatacactgagaaaatggcacaattttcaataaatggttctgagaaaactggatatccatgtacggaacaatgaaactagacacttatccccctccatataaaaaatcaactaaaaatggattaaagactcaaatataagacccaggctataaaactactagaaaggaacttagagaacattggggaagaacaattctttaggacattgttctagataaaagttgtatggccaagaggcaacaacaaataatagagatatgggacatcattaaactgaaaagctcctgaaaagcaaaggaaacaatcaacagagtaaagacaatgtgtagaatgagagaaaatatttgcaaactactcacctgacaaggacctaatattcagtataagaaaagttaaaaactgaaataactcatcaacaacaacaaaaaaaactaataataccattaaatagtgggccaagaatttgaatagacttttctcaatagaagacatacaaacggccaacaggcatatgagaaaaatgttcaacatcactaatcagcgagggaattaaaatcaaaaccccagtgagatacaatctcaccctagctggaatggctatgatcaaaaagacaaaaaatacaaatgctgatgaagatatgcgacttcatatttttctagtccaattctctgggaacaatgagagtgctctctttgctctccctttagtaactatttttcacatgcaaaaatatgggccctactgggaaataatgcctaagaccaccaacaccttaactgtttgttcatcacactagaaatgaaactgttttccaaataatattaacatctatctgtgtctatcaccattgtgtcaatgtttgtgtgatcctataaagtttagaaggcctagaagaatgcccttgctttttgcaatacaaaaatggcctaacagatatagatgacatagatatagatatagatatagatgatatagatatagatatagatgatatagatatagatatagatagatagggggttgtatcttggaatttgtttctctaagggacttatttcacatctaatttgaaattattctggttttaaacattatagaatgataacacaattggtgaaccaatcattctgtgttgaggttaacagtatttttttacttcaattctcactgaatgagagcagtttttatacggaggggccatgccataacaatatcacatactggggttgttctcagactgtgaggttctgcctacaccaagccaggatgagaattttatttgtcaaactgctctctccacttgtttgtatcccataatataccccaaaaatgagcataatttcattttttatgctgtttgttcttacatttaatacatgtaccaaaaagttgtctttgtttttaaaataaaattttatgctatcttttaatctatgtccctatagaaaaatcatgatccatacacatttgttatcacagaaagaacaagataaatttcctctctctctcataaatgccatgaccgctgctttttgggattatttttcttaaattattttttaaacagaaattcatataacttaccttaatcaaatttcttttcaaagtaatcacatttcttttatgtgaaaaattatttaccttcttttatcaaaaattatcttaatacaaaatatgtattgttttacttttagaagaaatggaaactatctacacattactaatctaaaaatacatgctctgggtttatatggtgttaacatgtcttccaaattttaaggaataggtatttaaatgtcatgcactttgtttttaaatttagaaaatgtttcaaccttttgcctgggcatggtggctcatgcctagaatccctgcactttgggaggccaaggtgggaagatcacctgagctcaagaccagcctgtgcaatatggcgaaaccccatctctacaaaaaatttcaaaaattggccaggcatggtggcaccacccacaatcccagctactcgagaggctaagatgggaggattgctggagccggagaagttgaggctacagaaggtaaactgttgaggctaaaacatggtaaatatttaattgttcacttaaaagaaatgttggttacattgaaaagaaatttggttaacgtaagttagataaatatctgcttaaaaaataatttaagcgagctgttagcactactgcattccagcctggtcaacagagcaaaatctgttgaaagaaagaaaaagaaggagagaagggaagggaagagggaagggaaaggggaaggggaagaggaagacagaggtggagggggaggggtggaggaggaagagggaaggggagagagagagagaaagagacaaagagagaaagaaagacaaagaaagaaggaaagaaagaaagaaagaaagaaagaaagaaagaaagaaagaaagaaagaagaaagagaaagaaaaagaaagaaggaaggaaggaaaaaaagaaggagaaaagaaagggacagaaaaaggaaggaacgacggggaaagaaagaaaaaaagaaaaaatatttcaagcttttcagtagcagagacacttcgtaatcaataagcaacagaaccaaaacaaaaaaaaaaatctacagaacagtctaaatacaattataaacttctgattcggatatcaaaaccatttcaataataaatatatggtatgaaaacctcacaaaggtcaagtagaatgtattatatttgaaagaaattacgagttgagagtaggaaatttataaatttaatcaaacaaataagcattatgaggaagttgtattgctaatgtattatttggcaagctgttcagtggaacaccaagatattcttaaggaagttgcaaatatctttttttttttttttttttttttgagacggagtctcgctctgtcgccccggctggagcccaccaccacgcccagctaattttttgtatttttagtagaaacagggtttcaccgtgttggccaggatggtctcgatctcctgacctcgtgatccacccgcctcggcctcccaaagtgctgggattacaggcgtgagccaccgtgcccggctgcaaatatcttttaagatgttgtcattgaagtggatttaaaagtgaggacatgaatacctttaaaaaatattcagggataaagagagaaaattaaatttagattgtatacatatataaaatgtattttaaaagatcagcttggctgggcgcggtggctcacgcctgtaatcccagcactttgggaggccgaggggggcgcggatcatgaggtcaggagatcgagaccatcctggccaacatggtgaaaccccgtctccactaaaaatacaaaaattagctgggcatggtggcgggcacctgtaatcccagctactggggagggtgaagcaggagaatcgcttgaacccaggaggcggaggctgcagtgagccgagatcgcaccactgcactccagcctggcaatagagtgagactctatcaaaaaataaaaaataaaaaaataagcttgtctctttttattccttaaataaaaggagcagacacttaaattccttgccttttattttaaaatttagaaaatgcttacagcttcccacagtgaaatttatacttagataatctaatcaatggataataatatcaaaacagaattctttgaccaatctattttcttcatttttaagtctaaatgtatactcaaagaaataaaactatttataattgattctgctgtttgaaaatatttactgatcatttaccttgcaccaactgacctccagctctgaagataggtcagtggtaaagtatacaaagttgcccagcttcgttaaacttaaattctaatgaggaaaaaagaagtaattaatcagggactttaaaacaggagtgttgtgatatggcttggaattctaattgcttcctgtgcttgctgtgtggagactggattgaaaaatagggcgatgataggagcttaaattcatacagaatatggctagcctgtattttgagggcccctgaaataagaatgtatagtagttctcattatttcctcaagaaatctctgcagtagagctttggccttgggagggaagtactatagtcaccaagtggtgagggtgggaaggtgaatttgcaaataccatttggaatgagttcactttaaaggtaaagctggcaggattttcatacatgtcagatctgaaaatctgtgtgtgcgtgtgtgtgtgtgtgatagagagagagaaagagagagaattagaacaagacagatacagacagacaatgacagagctgcagagacagagagaattaaatggggacaccaagaatattgagctgagaaactataaaatgggaggtgccattaaacagaatggggaagagcagttttggggagtgtcagtggctccacgtagacttattaattttgagattcctaaaccacatccaagtggagaagacagacagtattgtgtgtagtctagtgttatggtatcatataaaatatcaggaaatgaatgacacaaaaattagtaagaaagcaaagataagaaagataaaagtcccgagcctagtggttatctactgcctaaaaagtagtaggctgggcatggtggctcaggcctgtaattccagcactttgggaggccaagttgggcagatcacctggggttgggagttcaaggccagcctgaccaacatggagacacctcgtctctactaaaaatacaaaattagccaggcatggtggcgcatgcctgtaatactcaggaggctgaggcaagagaattgcttgaacccaggaggtggaggttgcagtgagtcgagatcgaatcattgctctccagcctgggcaaccagagcaaaacttggtctcaaacaaaaaaaaaaaagaaaagaaaagaaaagaaaagaaaaagaaaattagcaaagatgagaagaaaccagcaaaaagtactaggtataattatcaaaaatgtcaagaggaaagtaggttaagtgttctagaattctatcaaagaaagttttgaaaaaaaagagggagagatcaactgcattaaatgctgctaatacataaattaagcaaaggctgaggaattacgcttcaattcatcatttaacaatatggataccatttgtgctttgataagagcaattttcttggaatgagtaggtgagaaaccatattggagtggtttctcaaaggaatgcctgatctctgggttcttaaggaaactttttattgaacaggggaggcacaaattggattagttttaattccggggtccggacacactctaaacatgtgcctctgcatgcctcgctttttaaagctaggtatcctattatctttcgataacaaaataatcacctgcaaaaccaacacacatttaatggacacacttgtaaagtgtgtactagaggttgttggagaggatgtgattccacgtgatagcttacgagtcactgatgggcaggtaagctggtaaaatatctttggaaaactcaccatacctgttatacttaaatattcagataccaaacagcagaaaatccatattgtaatatatttccatgagaaaaaacaagagctctgtattaaaatattgattattattaaaaataatcccactgggtttcctgacttttttattagcaagtcagtctccgcctgttttcagtagtacaacctctatttaacaaatgttttgtatttttaatcagccacttagaaaaaatattatattttatatcaattctacgttcagtgccaaaaccagtgttttgtacattccacagaattatttgttgaataaataatgaataacttaaataagttatagtatccatatataaataatatatcatctccgaatacagtgataacatttgttatgtagaaaatgatttcaatctcagttaaaaatattttgggcataggagttactgtcatataaagattctcacattgttttgtttatatgaaaatgtttgcagttaacgtacatttttggtacctaaggcttttgctcttgctgccatagcaaacagtgtgcctattaagaacacgaacctgagttttatttcattttaacagatttcttaataaaatatatgccaccttatttggtttaatacataagcaaagagccatccactccaccattgccccttgtccctcctccaatgcagctccttaagatgttactgatagcagaggactttgtgttcaacctaagcactttatagcccttttattttcaactaggtatgaggtaaaataattcagcaccaataaaacaaacactctttaaacaatgaccctttttcttagcctgttcaacaaaacgcagcaagacagagtacacttctctttcccagcaaatcagtgttgccactacattctctacgttctgaaaacttgtattattgactttcttacaaacaccctttgagcttataatttagatgtcatcaaataatgtacaaaaacacgctacttcctcccccttctcttctcttcttaccagactattgtcagtttgcttttctatccaactcctttcttctgtctacttgatttttaaaagactttctacatatttactatcttggtattgtagagaccaactatgtggtcaaactacacatataggaagaactgaattatatgcaagcatttttaaataaacgattcctcctcagttttctgtgattatttcatataatcaaatgtcttccagatacacatcccaaacgagtggttgtcaagctctgctttgttgtctaattttatcagaattatccaaaattcttatgataaatacagatgaattagcataactccagatttatgaaatgaaaatttccagaacccaggaatatgcattgaaaaaatgtattcctcacgtggtgctgatgtgatatgggatctgagtttagaatccaaggaaaattaccctccttgccctctagttggccagaattacctagttgaccagagttgctctcttgttatctagaggtcctcttcccttttcacattctgctctctctccttctgtaccttcctcctctcctccctccacttctgctcatccagatcccaagcccttctccattgattctcctaaaactccaaatggtcagttgccactaaagtccctctgtcccatgaacaagatttgtgggcaaatgtagaatttaagcttggacagagctgaatcagagctgcaattaaagatttccctaaacccagcagggaccagcaaatacttatagaagattagagatttcttgtgagtgcaaagggctcagagtgacctgatgctatagaccaaatcttatggtcccctcaaattcatgtgttaaaatctaattccccatatgatgggatttggaggtgaggccttggaaggtgattagatcatgaaagcagagactgtatgaatgggatcagtgtccctatcaaagggactgctgagagctccctcatctcttctgtcatgtgaggacacagtaaaaagatggcagtctatgaacaaggaaggaagccctcatcagacacgaaacctgctgacgagttgaccttggattttaccatctccagaagcatgagaaatgaatttgtttctctgctacctagtgcagtgcattatcttttggcacccagattggctacagtaccaacatatcaacttgtacacgtaatttttgaaattctgatgccaaatctttgatggcaacaggtgattgatctgctggaggaatggactgacatgatccctctttccacaataaaccagagagtaaaaacaagcaaaagtaggtcaaggtcttctaaaagccgtacctgaaaggtttccagtaacagttgattagatggtaattcaatcacacaaacaaccacggcaaagatacacaactatcagacattttcagaatagcctctaaaacaacatctgacaacattagggagttaaagaaggcacgaactttcaaaaagtcaaactttatttaaatgttattgtagaaacttgtaattttaacactatggatgaattctagggcaggtggtggcatggcatggcgatttgggggcacaagtgctgagttttgaagcttcggttttgataccctttggagatgccccctggcctccacacccctgcccacctgtcaagaagagcctgtcctgggcagcacctcagggacaaacagcccagaagcccagttgagggcagacctccaaggttggaggaagaagccgcctctgggagcaggaggagctgctggatcccctcctcccaggtttcttttcctgccccccagcgcctcttgcaggcaggcaaacaaccccagcaggagcagcagcaggcccttcagccgcagggctgcagctctgctgaatgagagaagcctctctctggcgagtcagaggagcgcaggccatatacccgggtctctacctccatgtctcccactgtgcccaggactgagcccagcgtgggagatgcgggctggggccgtgctggccaccccctctcttccacctcttgctccagccatgctttcagctccagggctgaggccagtggctagagcagatctcatgatgtcaggtagctcctcactgggctggtccttggcaggaccaggacaggggcaggagggatctggagctgctgatagctccagttctgtccctgaaggggggtcttcccctggtgctggcactggctcatcagctggcgctggaatttcctgtgttgctgcacatggaacaggagatgaaaaagaagaaagactcaccaacgtcagtcactttccactggaattttcacacacagaatcaacctcgctgaatgtaaggtattccagcccgaaaacactgcccctgcaaaggctcatagactataggccacctcaccgtgtgcctgtgcctcgatgaactccagaggctccagctggacaagaacaatgtgcagatgtggccgcgatgggatcaccggtggggcctggcctggtagggcctgccctgggctgccctgtggtacttgggggcgcctttgcccaaatggccagaggcgcctggagtgagagatgagtgaggtattgcccctcacaagagggcattagctgcggggatccgcccacagaccctgacccaaatgacggatgaataaaacgtacactgacacagagttattctgctttgccagtcctgctgagtgtcccactgcctgcacaccaagagaggtttgtcactgcagctggccgtgaatagctcgcactgcaggcatttatttagtatagaatttacaacggaagctttgagtaaatactcttgtggataattaacatggttaagagagtagttctaccaatgattaaagctcaggtaccatggtttaaagtaaataccactgggggcaatttcccgggtctacctcccccctcctccccaagaggactatctggctcaaaggctagttaatggaagtagggtaaacagacttaactggggaagcctctattgtccctaacatttaccctatgagctaatgctctaagataagaagcagctgccttcagcctgttcaattattacaagctatgtaacctttccgccttccaaaaggtttgtgactattccctgtaactttccctaatatttccctttaatatttctgccaccatcctgagtgaatcccaatagatgagcctgcgtcagcattgtgggaaaaggctctcgctctgggccctcctgaagcaggagactcgagatgtgggaatgcagcatgagaacatcttgctctcctgagcatctcccaccaagggagctggctgcgggtctgtccctaggatgtgggtgcctgattaccagagttctaagttctgttagagtccatcaccaaggaagtgaagtcacttctttaaggttccgtaccctcggctccttccttcaaaacctactcagaaccccctgggctgctggctgctcaccctccccccaggtcagctccttacctgtacacaggtaagtccacccagtgtctgcttgtacacctgtgcctgatgtgcacctggggcctgggaatccacttagggcctgtgatccaacaggggcctaatgttgattaaaactaattttgattattcctatggagaaggaaaggccttctagcaataagaagcagagttccaaatcaaatacgtaaaaatgatcaaaaccttgtaaaagaaaagtatcttaattttaatcactgaaatgttaactttttgataaatatttaaggttataatgaaaaataaaacaatactaataaaataacagttgcaggaaatgctattgagtttcttgtttgtggtttgaacactgaaaggtcccacctagttatggtcataatttcctaccttaatcttcttgttcttatgagtaatagaaaaaaacacaatgacgatgaatgtgatgatggttcaaatacacaactgaagtttagtggcagaaacatcaggtgctcccaattacagtgcagctgttcttactgaggtgagaaaaaaaatcttgttttcaatacacacgggaagcaggagtgcacgcggatatgaccgcatttctctgaacttatgtttttcacagaagagctacagtttatcctgcattctccgttctgtgatcaaaaaccatggaacagagaagagcatttcaacctgagactcaattataagaattgcgtctgccccacctccctgcaaccatatatgccacctctctgtgctgagcctgaggggttcacatatggcacagactgaggctggactcaacagtccttaccctcgcaggtgacaggcgttctggggtcacttggaggagggaagctcctgggctctgtcttctccaccagcagggggcagcacagctgcagacagaagagaggctgaggctgcccagaaggagcctaagagggaggccagccatgaaggctcaaaaggtgtccaaggatcagtcctcaatttggaagtccagtaaagtgcatcctatcccctcgggctgcagtaactccgtcctgactgtaagactcatgcagcgtcactcagggcactgacaggagcccagggacagtgagagcctcacctgggaaatgtagctggaggcgcctgggccccggtgtcagcctggggagcttccacagggctgggattccctgggagacgccccgaggtcaaggtgctctaggagggggccacagtgtgagaggacagggtttccagggcccaagcccttcacctagtattgctgcctgagcctcctgccactctcatggtcttgtccctctctgatcagcagcattctggggagctgagccctcagtcctgggcacttccagagacctccccccgccaccccttctccctctgcctttccttccagctccaggcatactgtgactcagggggcagctcctgtgctcaggggagtctcacgtgggtggggtggtgcactcaggaccctggctccaggatgtggcatttccagcctccttgaggagatgctctccacagggaaggggattctcacctgcctcaggccagagctctggccacgaggctgtccttggctcagggacaggatacacctcattgcaggaaccaaggaccacccaccctgcagaccccacaccctgtccaaaggctgtgtccctgggatgcttacagcgaccatggggcttaaagttgaatttcccatcaatatttcatgtaaacttgcaaaaagcacaagaaaaccacactgggctgagaactctggtgctattttgctgttttttacaagtttacataaaatattgattggaaaaataaacaatggcagagctgaggatggcaatggctggtctactgtggggatggggatggcctagaagtatcagccccatgggtgaaatgagaccagacgtcctgatgactccacatgggtgagtggttccttaaatgactcaactattctcactgaaatagttaactagtgtcctaatgacacaatccatcatttagatgaaatgaccaggatgggacatttcctccagccaggaagactgtggacaaattcatgaactgggctggcccagttcacctgggtctgagaccccctggatctgagtccctccagccctccaggcaggctctgaagagggggcgtcaagagtggatttagacttaggtgaccaggatgtattggggtttgaggactcagctgtgacttagggaaatggggcctgattgaatcatcagactgaggtagacatccatcagctgggctctggatttccattggtcatgacaagccagtccttggcctgaatatcctggatcagtccccagaactgcccagctcaggctcaagtcattctctacagaaaaaccagtggagtggacactgtaggatctgcccagattctttcttctgagctcacccacccagcactgctgggagcttgtggcagctgagagctgtgcctttcctgggaagtgtggctcagcgcagaaaactgcctcctccaggtttatgcccttcctcagcaagattaggtttcatgactgcctgaggccaagttctcaagactctgcctcaatataggaggaaatgaaaatcctcccagctccacagctccctgtaggaaagactgagacctcaatgtgcgtcagggtctctttccgcccagtgttgcctccctcacatcctctgtgcatgaattcctcatctcagagtctgcttccagggaacccaaattaagatcaccagccatccccaacatgggccatgcggaacctcaggaggccactgcacactggaaagcgcccatttattcctaaattagcactgtgagtatccaaatgcccaatgagatctgagtgtttcttgcatttgtatggaatggaaagggagcctgacttgccaggtgctctgggtctgagggagagttggagtcagatctccctgcagggaaacccgggacaggaggagaagcctcaccccatgcagggaccacagatgcacccacagggtgagctgcaggatggacactgcccacagggtgagctgcaggatggacactgcccacctccaccctccatgccctgtagaaaaaatcattctttccacccctccttcagcctatcaaagttgacacttaaaaagccaccacaccccacccttgtcaacaggaaacccattcacatctccatcagccacacaatctccaagattcttcaaaaaataataacactagctatgcaaagtatatgatatatatcataaataattgtacctagattatatatgaaaatgatactttttgatatgctaggtaaataaaatatattatttaaactcattgacttcttctctttgtatttataatgcgatgactagacagtgggattcccatgaggctcacatcatattgtgattgaacaaggctggtctgcagggcttcaggttacaggggctgtggagtgacctggtgcaggaaaccccgtctccatccataggacatcagtgtgaacccagggagaggcgctggtatgagagatgagaacacaggtgtgaaccacctgcttgtgcaggggactgagccttcactttgagccaaagaagtttcttttcctatcttcaatcctgaacaagagggctttctggacttctttttgttttcagatttgtgccccttcaggtttggggctgtctggagtcccagccagaggacagtgaggaaatccaggagtctcacactgactctgttatatttcatctgctggggccatcccaaactgctgtgtaccatttcctttcctggtgctcaaatagctgctccattcacctgtcatggtttcagagatgaatctaggtgggaagacaggacagtgtatgttataatatttaaatggaagctgattccattaatatttattttaatatgaaacattaaaagaattttgttataggctatagggaaagatgaaaagagattaaaagtattttgaaaaaatgtatttatcgaatgtctgtgtgtcttcagtgttgcagggttgagagaggtcagctttaggttggatgtgctcagatgaggaaaagcaagaaagcaggaaacacgcggctctgtgacctgacacataaatcacagtaaaatggaaataaatctttcaataaatgaaacattcaaaataaacgtcactctggtgcacacagaaaggcctattagcaaactttccctttgtcctgctggctcatatccccatggatcacctgtgtgcagagtggacactgtagtccccatttctcaggctgagaactagaggctgggaaggacaagtcacctgcttgtgagtgggaggggcaggattgggagcagtggactcgggctcaggactgcggccctggtcggtgctctgtgttccctccacaggatccctcccacatgtgcccgtgtggatgtgggtgcactgcctggggtggctgatgtgctccagggattcgatggtgcagatgcttcagcacaaagcttgggggtggggatgggatgaggctgcagctggggagaccagggaccaatgccacccagcagaggtttccacggggtgggcagccccatttcctggcagtagagacagcctggaggtgggtgccaagcagagggcactgcagggtgtgcccaggcctggagggtcacaaagacacaggcaccacacagcagagtcactgaggaccagaagctcactcaggtaagggatttcagcagaactttctctcctgagcaaatcaggtacaaaaaaattaagatcctgccatcagaaaagacaaacaagaactttttatctcctcagctgagccccactgtccagggaagcagaagtctctgagcccagcccaggtgagggtggggtgaggagaggagctcagggtggagatttgcatggaggccccaccctcctctgaggcagaggggataagacagggctgggggcaggcccagtgctggggtctcaggaggcagcactctcgggacgtctccaccatggcctgggctctgctcctcctcagcctcctcactcagggcacaggtgacacctccagggaaagggtcacaggggtctctgggctgatccttggtctcctgctcctcaggctcacctgggcccagcactgactcactagagtgtgtttctccctctttccaggatcctgggctcagtctgccctgactcagcctcgctcagtgtccgggtctcctggacagtcagtcaccatctcctgcactggaaccagcagtgatgttggtggttataactatgtctcctggtaccaacagcacccaggcaaagcccccaaactcatgatttatgatgtcagtaagcggccctcaggggtccctgatcgcttctctggctccaagtctggcaacacggcctccctgaccatctctgggctccaggctgaggatgaggctgattattactgctgctcatatgcaggcagctacactttccacagtggtccaagttcctggggaactgagaccaaaacccaccctgggctctcaggctcccttttgctctgaagatgcttcctcaccctgtgcaaggggcttcctgcagcacggccttgagaattcttctctctcagctcctctcctttcccaccatgaaatccaacaggaaacctgccctgtggtttctcatcccggacagggacagcttcctggtgcttgtgtgctgtggtccctgaatgtgcagctcttcccagctcttcaaatgcagggacagtgacaagcagctgcctgattggtgcagtcactgcttttttttcagagatgtcttcaccctacatgcatcaccatctcccacactgtgggtagaattttagccaaatatggctgggcgcagtggctcacacctgtaatcccagcactttgggaggccaaggctggcagatcatgaggtcaggagatcgagaccatcctggctaatacggtgaaaccccatctctattaaaaatacaaaaaattaaccgggcacggtggcgggcgcctgtagtcccagctacttgggaggctgaggcaggagaatggcatgaacccgggaggcggagcttgcagggagccaagattcgtcactgcactccagcctgggtgacagagcaagactccatctcaaaaaaaaaaaaaaaaaaaagaattttagcaactacattctaatagttatcgccacaactttgatcttaaataacagtgcagtgaacatccctatgcagcctcctttgagttcctgtgtgaatatgaccataggatacatttctaaaactgaaattgcgggtcagaaagatgtgtgtttgtaattttcacccattgttgtcagattcccctccagaggggttctaccaacttacaatgccaaccataagtatttgttcagagtacattgttgaaagtgtaaatttttgccaacctaccagactgaaaaatgttatcttgttacagttttatttttgagtctcccattctgcttaaggttgggccttttcacaaatagttcagtactctttatttttttagtatttggtaaactttttcttgaatatccaaataagaagaattttagtctttgtggcaaggcacagtgggtcatgcctgtaatcccagcagtttggaaggcttagacacgtaaattgcttgagcccaggagttcgagattagcctgggcaacatagtgaaccctcatctctattacattaaagaaaataaacataaattttaaaatgaagtattttagtctttgtggcccacgaatcaactttggggatattacataggtacttacagcaccatttataaagtaaccatttaaaatgataaaaaccactgtcagctctgggccacacaaaaacaggtgtcaggccagttctggcagggtgagggctactatggtgggaaagggaaatggaagccagtagagcttctcctacctagaaaaatagtaaatcaaaaacagtgtcatatccctggagggattgcagagattagtgccaccatcaaggacttgaaagacacagaggtggtgatcagcaccacatccctgttcaactctcccagttggcctgtgcagaagacagatggatcttggagagtgacaatggattatcataagcttaaccaaatggtgacttcaattgcagctgctgtaccagatgtggtttcattgctcaatcaaattaacacatctcctggtagctggtatgcagccattgacttggcaaatgcctttttctccattccggtccattaggcccaccagaagcaatttgccttcaactggcaaagccagcaatatacctttactgtcctacctcagagatttatcaactctccagctttgtgtcataatcttgttttttttttcttttgagacagagtctcgctctgtcaccaggctggagtgcagtggtgcaatctcagctcactgcaacctctgcctcctggattcaagcaattctcctgcctcaacctcctcagtagctggggctacacgcgcgcaccaccacgcccagctaatttttgtaattttagtagagacggggtttcaccatgttggccaggatggtcccaatctcttgacctcgtgatctgaacgcttctgcctcccaaagtgctgggattacagacctgagccaccatgcccagccctttgtgtcataatcttattcaaagagatcttgatcacttttcacttctgcaagatagcacactcgtccattacattgatgacattattggattggattcagtgagcaagaattcacaaacacaatggacttatcggtgagacatttgcatgccagagaatttgaaataaatctgactaaaattcagggaccttctacctcagtaaaatttctacgggccaagtggtgtggggcctgttgagatattccttctaaggtaaaggatacgttcctgcatttggctcctcctacaaccaagaaagaggcgcaacgcctagtgggcctatttggattttggaagcaacacattcctcatttggttgtgttactctggcccatttattgaatgaccctaaaggctgccagttttgagtgggttccagaagaagagaaagctctacaacaggtccaggctgctgtgcaagctgctctgccacttgggccatataacccagcagatccaatggtgcttgaggtgtcagtggcagatagcaatgctgtttggagcctttggcaagctcccataggtgaatcacagtgcggtcctccaggattttggagcaaggccctgccatcctctacagataactactctgcttttgagagacagctgttggcctgttactgggctttggtggtaactgaacattgactatgagtcataaagtcaccatgggacctgaactgcctgtcatgaactgggttctttctgatcaatgtagccataaaatgggtcatgcacagcagcattccatcatcaaatggaagtggtatatacatcatcaggctcgagtaggccctgaaggcacaagaaaattacatgaagaagtggctcaaatgcccatggtctccactcttcccccctgctttctctcccccagcctgcaccgatggcctcatggggagttccctatgatcagctgacagaggaagagaagactagggcctggatcacagatggttctgcaagatatgcaggcaccacctgaaagtggacagctgtagcactaaagcccctttctagaacatccctgaagaacagcggggaagggaaatcttctccgtggacagaactttgagccgtgccactgggtgtgcactttgcatggaaggattttagccaactacattctaaaggttattgccacaactttgatcttaaataacagtgcagcgaacatccctgcatccctgcatggaaggaatgccatttcccataaatcaccaaatcactcagaatgactacgcataagcccttaatatacgccagatgcattggttattgttttacaagcgggacctcaagaagactttcataatacggaataggatgatgcaaagccctatgctcaaggcccgatctttactagaaaactagtattgggaggttacatgttttccccaaacagatctttgaggaatcccgcagatgccaaagacctgctggcctaagagtagacacttattttctcacagttctgaagctggagagccaagataaaggtgtttataggtttggtttcccctgaggcctctctccttggcttgcaggttgctgcctccttgctgtgtcctcacatggtctttcctctgcacactcatttctggtgtctcacttctgcgaatgcaaatttttattagcctgggttaataatttttatatcagcctggcagattctatcactgatttacttgattatcctatttacttgattattaaactccttctctgctgaggtcacccattggtgagcactcgcatgggatacaaatatcttcacagtttttgatcactcagagggatccatccacatagctcttccccaaatttctttgtcatcaattttccaatcatgcttcttccaagtccctgatcatccaaccaaaccattggctacagcctatgaatcagtataaaattgcatatctggacatttctccttccaggcagtgctgagaaaagtggacatccacatgcagaacaatgaaactggacccatctctctccaaataaaaaatcagcccaacaaggattacaaacctaaggataagacctgaagctataaaacaactagaagggaacatagataaaattcttcaggaccttgggatacacaaaaatttttatgactaagacttcaaaagaacagacaacaaaaataaaaatagacaaatgggagtttattcaactaaaatgcttctgcaaagcaaacaacagattgaagacacccttagaatgggagaaagtattcatgtgaataggtcctaatatcctgttcatctgaaaaggcataatatccagtgtaagaatagaggacaaggctctaaaataactgattagcattaaaaaaaaaaaaagtgggcaaaggacctgaatagacttttctctaaagaagacatacaaatggcaaacaggtatgtgaaaaaatgcttaaggtgactaataatcagggaaatgctaactaaaacccaaatgagatatcatctcaccgctgctggaatgactatcatcaaaacataacaaggctaggcgcggtggctcacgcctgtaatcccagcagtttgggaggccgaggcgggcggatcaagtggtcaggagatcgagaccatcctggctaacatggtgaaaccccatctctactaaaaatacaaaaaattagctgggcatggtggtgggcacctgtagtcccagctacttgggaggctgaggcagaagaatggcatgaacccgggaggtggagcttgcagtgagccaagatcgcaccactgcactccagcctgggcgacagagcgagactccgtctcaagaaaaaacctaacaaacacccgtgacgatgaagagaaaatagaagaaaaaatcacatgactgtctcaacagtcagatcaaatgttttctttcaaggaaacatttttgttggttgttttttctagtcttgttagagcatcacgcatgataagatttgtggtacagaagttagaggggatgttgttccatgcaaaatatctgaatatcccatacccaactcttcggttacttactgataaatgctaaaaggttacaattttgtattttcaaatattctggtggccagaaacctcttccttgacaagtctggagtacaggtatctgactccagatgattagaatttaggcaggtattgtgtgagcagtgaggtcacacacaggaaacgttccagtcaaagagaaaaacagacggaggctgaaacacagagatcatatgtctgagaaataaggaaattccatactaatgggagctgagtgagaacaagatatgaaccatctatttctctctgaatatctcattgggatcttgtccctttcccagcataccactcatgtggattttaaaattgtctgctcttaaaacatttcttgcacatcattagagagtccagcactggaatcaagctcagtttgatgagaccagggcagttaagcaccaaacccaggtgttcttagaagggcttgtagaagacaaaggtgtgttgtcaaaagcagagaaagtgagactttccattgtggtttaaaccacagcttctggaatttcattgggcacacaaatcccctgaggattctggttaagatacagctgtgccctcagcacatctgggtatggccccagattctccatgtctagcagcttccaggtgaggctgatgctgctggtcctccaaggacattttgagtggcttagctcctattcaccctcctcacgcaggcacaggtaagactcacctaatgaagaaacctgagaagcacaggtgaactctccctcccctcctggtgtcttagtaccttttgtgttgctataaaggaatacctgaagctggatagtttgtaaagaaaaaaaagggtttattggggtcatgcttctgatggctggaaagatcaagattgggtatctgcgtctagtgagggcctcaggctgtctccactcatgatagaaggtgaagggaagccggtctgtgcagagatcactgggagagagaaagcaagctttttttcctaacaaagctgcagggatgtaattgagtcatattcataaagtgctcaatacagggcgtaacatattcaagtgctccttagtggacagcaattattactgaccttgctcatgaaaattagacctcagatggaggaaaggcagtgccgagggttttagattgttcgaaataagagagattaaaatgatttaaaatagaggcccaggagctgaggcaagcatccccaggtgttctcctgccaactccccccatgtctcagaagctgttttcaggcaagtcagccagggaggaaagtgggggagtttgtagaaccaaggattgcaacttcatccatgaggaggaggtgtagccagccaggtggggagaggctgctaagctcatctgaaggctgttgaaggctttctggccccatggtcctgggccatccctccctgcccagggccgcattcctcagctgacagccacaaccttgagagaggcctgtgagtctgatcagaaatcctgccagggccccgagggggcaggcatggaagggaggtgtctaaggtcacaggagacactatttgctgcctgtggggctgggacaggctccttgagaggaaattcgggcactgtacgggaggaaaacacaggacagggaggcctctccccaaaggattgtgatgatagagaccaaagcatctgcaaagagcccagccctacaggggattctctgaacacagcattcctcggggcgtctgtgttattttgccagggttaccataataaagtagcacagactggatgctcagagaaaagaaatgtcttctccactaatctgtaggtgatgttagaatctgagatcaaggtgttggcagggttggtttcttctgaggctgagcgagggcctgttctgtgcatctccctggcttcaggtgcttctggaaggatgtgctgttccctgaattacagacaaacaccccaatctctgcctccatgttcatatggcattttccctatgtgtgtctctgaccatgtttcctcggttttttgtttgtttgttttttgctgttgttgttttgttttgagatcgaatctcgctctgtcgcccaggctggagtgcagtggcatgaccttggctcactgcaacctctgcctcccaggttcaagtgattctcctgcctcagcctcccaagtagctgggattacagatgcctgccaccaccttcagctaattttcatatttttagtaaagatggggtttcatcaggttggccaggttggtctcgaattcctgacctcaggtgatccacctgcctcagcctcccaaagtgctgggattacaagcctgagccactgcattcagccatttcccccttttataacaacaccgctcctgttggattgggagcccactctacttcagtatgatgtcatgttaacccattacatctgtaaccaccccattcccatataagatcccattttgaggttctggggctgaggacttcaatatcaattcggcgggggggagcctacaatgtaaatttgtaacattgtctctgtcatgggccagctgtcaatattccctgaatatccaggatccacccatgctctctggccatcaccagagtgagcaaatccctgacacatggataagagttgcttccatgggctcccagccaggctggaaattcttgattcatggaatcaagaatctttctccagtgggtggggctaaatgcagctgcctccctgacagtctccctgggacactaggcttatcagcttttctcctaaagctgcaggtcctgactgtcctgagccccagctctgctgtggtctttgcatcttaagatcttattcaactcgcttttgtgcctcagtggactgacttacaggaaaacagtgggagatgcccctgctctctctccccagggtctcctcccctcagtggcacaagacctgccctattgactggcagtccccccatgcccatctcaacctccacactgcccactgtgcacggtcacaggtcacaaactgattgttcactttgggcagatcaccttgacagtttctgcagaactgggtgcttcttcccagaatcaggaatttacaaacaaggccagttctagagatgcaactgggagagtaatgtgcatcacagcgaatctggacaagacaaagtggttttgctgtagttctcctggaacacattctggtgatgtgtccatctcccaggatagtcttagcaagttacatccaatgctgcatcaggacccacaagaaaaggaactggcctgcatgagtggccggcagggtcctgggaggagaccctgagatgcccagtgacaggaggagtggattcttaggttggtaagcgtgtggaggaactgcgagtgatgtgctcagccaggtacaggagcaggcgtattggtgacctgtggcctcatcttatctcagttgtctctttagaccaaactccaggaaatcagcacatagagacttctgtctgtctccgagatcatcgcaggacttcacacgtcttttctatttataatacaacatcatgttgtgattgaattactttcatcacagcctcaacagtcctaggtctgaaaactaatacatatacttagaatattaattaaggaatactttcttgtcaattatgtttattaaattaaaagacttcagtatctagtgttacagctgtcctaattcaacagccttgaccttcttagaaataaaatcctgatcccaaatttttctggggatatgactggcacaaggagccaagcagacatctggatgtcccagtgtcactgctgacatgtgcttttttgttatctgtcatggggtgaacagaggaagtgtccctacctctgtccacagaacccatcaaagacagtgcacctgattaaagaagagagggttgtgatcagaggggtccggggtcctgggatgaggtgggaggaggagactcatgggaagaaaggaagcagggcaggaagaagctgaagttcaggctctgaggtgcatctcctgcatggaatcttgactccactcacttctgtcattgtgtaatctttcaatgttggttctgtcatcagtaaacttgaggagaggttatgccataagcatagggctgaggaagggttattataaatatccagtcatggttgtgcctataaaacactcaccaaagactctgaatatattaaggtctcataagtagttgttttgcataatctagtgatacatggaggatggcattcctcctgtggacagcaggaggcactgtgggtgtatcgtttggggatgctaatagctccaagtcccccagtagagctcacgtgcaaagggtgtgactgatgtttcctttcaggtccagtctttttgagtacaatccactctccactcctgacacccacttggcccttctcctgcctttgagaaatgactaccctgaggccatcagctccagggctcagctatgagctcagacagacacgcttgggaatagagaacagatttggattcaatgctccttccttcttgagcttcaagaagaggataagataggagctggttgtgtccaggctccactgggcagcctcgatcagagctctcggaagtgcctcccaccacggcctgtgtctccttctacctcctgcccttcatattctccacaggttggagcatccagagaattcagggaaaccctttcactgctatttccccccagcactggtcctcagtggcattctttccagttctcctgtgcattcagcatcattcatgaaattatatgtttccaggtctctgtgctctgtctgtgctgacccagcccccgtctgcatctgcctggctgtgagcctcagccaaggtcacctacaccagtgaatagtatcaacagagaccaaggaggtccccctagtgtataatggaggttaagagtaatggcagcgacagcaaggggaacaggatccccagtcacttattgggctccagccctggggctgaatgctacttaattatcttcaacctccaatctgaggatgaggccgagtatcactgtggagagagccacatgtttgatggtgaggatgggtgagccacagtgacacagaccaagaagtgaggccaaaacataccccctccccttcctcttcaaggactgagagtgagaagccctatgtcatctccattgaccctgagaatgttgactctccccctttcaaatttcatcatcccagatgtcctccctcaagacacccttaggcagaggcagatgcaggccatgattgaggccattttgataagtcatcaatctgtttccaccacaccagcctgtggggactacactgggagagaccagaacagcccaggcaggaaaacggccctgagagaggggtcgggctgagatgactgcatccagtgagtgccattgcaccctgcacccctgcctcaggggactgtcatggggctctgcctgaggaggcaacatggatcttgacatgtccccagccatttatgagaactgtagttgtgtgcatcctcattaacactcaatattattgtcagtttttgtttaaagccactctaatagatctgtagcgattcttattaattttttaacttgtattttcttagcaacatcaggctgagcatcttttcaggtgcttgttatctgtatatcttctttggtgaaaagcttaatcaaatcttggtctatttttaaaattcacttttccccatattccccttcatgcagtatttttcaaaaatggtgaataaatgaaagttttgctgacatttaaaaactcacagaattgttcaccaccagactgttgctattagaagggtaaaggatatccctagacagaaggaaagtgatgtcacattgaaatgtgaatttacacaaaaaagtgaaaacatcaggctgggcccagtggctcatgtctgtaatttcagcactttgggagactgaggcaggagtattgcttgagcacaggagtttgaggctgatgtgaggtatgatcataccactgcagtccagcctgggcaacatattaagaatctgtctctattaaaaaaaaaaaaggaaataaaaaaattaaatatcaggtacagtaactacatagatacttgtgaaaacctctgtattatgttaatgccaataaaatacagttcactgatcaaagataaattaataaaatacattgtgatttataatgaaaataaaggcaaattatatgacaaagacagcacaaaatctgtggtgggtgaagaacatgttatcaaggtctcatatgggaatgtgtaacaactgcaggtagattttcataagatctctatatacataaaccttaaagtagtcattaaatcaaaccttttgatcaaaaaagaattagagcgaataagctacattagggttatccacagaaacaaaattggtaagatatatatgtgtgtataacatacatatgtgtatatacacatgcatgtatgtgagcatatcgagagagagagagaaacttaaaagaagaaattggttcataggattgtcctgtctgacaaggataaaaatctcttgggcaggctgaaggctggaaatgcaggtaagagttgatgttgcgtcctgagcctgaattcagcaatacaggacttaagaaatcctcactctttgctctaaacacctaaacactttcttttttttttttttttttttttgtgagacagagtctcactctgtcacccaggctgggttacagtggtgtgatctcagctcactgcaatcgccacctcccagcttcaagtgattcttgtgcctcatcctcccaggtagctgggattacaggtgtgcaccatcacatccacctaatttttgtatttttagtagagaccggctttctccatgatgaccaggctggtctcgaactcctggcctcaagtgatcctcctgcctccttggcctcccaaagtgctgggattacaggtgtgagccaccaggcctggcctgctctatacactttctactcatgaatgaggcccaccgcattgtgatgagtaatctgcttatacaaagtctactgagttaaatgtgagtcacatctggaaaatatcttcacataaacttctatgtttgtactggacaaaatcaacctggaaccacatcctagtcaatgtgccacttaaaattaaccatcacttaagccggcatgaagatagaaaggaaccattttttaaagcaatcaaaaacagagacagagaaagggaaagaaaaacaaggaacatatccatagattgtattttttaagtcactttttgaggttttctgttgttttcctgttttctatttcattgatatttggctcttaactatattaataccttttctctatttaaattgaatttcaatgctctccttttccttagatttatgaggtagaaccttagtttattttagatcttgcttctttccactgccaaacattcaatccaatagatttatttaaaactacttacttatatctattttttaaattttaatacatttgtttttgtgttttaaaagttcagtattttctaattttgttgtgatttttttctttgacttatgaaatatgtagttttatcttctttcatttccaaaaaattgaagatttaccacagttcatcatgtatcaattccatttaattagttaattctgcattaaatcataccttgcatgagcttcatattttcaaatttgttaacatttgttttgtggcctagaataggaagtatcatgaaaaatgttccctgtgtatttgaaatagcaatgtttattctgctgctgtgggtatagttttctacgaattcaattagcctaagttggctaatagttcaaatatatattcttactgtttttttgtgtatttattttgtaggtctgtgagagagagagctattgaaatgaacaacactaattgtagaatttcccattgcttcttttgagagaggaaaatttccagtcatggttcttaatactttattctcctgacaaaaggtcacctatgattttccaacactaatcaaggaaaaaaaaaaggcagagttaaagccacactcatggatgccacgggagcagtgggtgaccacatgatgtccctccactggttcagtagatttagcgagacattatattttggcttttaaaaatcataaatctggctaagacatccatgaacaaatttgaagacatacacattgaataaaatatgaaaattaaaagaaaggtaactgcatacgtaaaacattgctatcacagcacctgactcatgggaaatggataaaaagtattataaattcaattacatttacttacacattaaacaaatatgaatttaaaccagttcactaaactgtctcatatactgtttaggtgatggagatttattggtgcacaaaaaagacaagaatacctgctctcagagtggcatcatggaagatggtggagtacgaagctccagcaaatggtccctcctgtgaaattacttgaagtggcaagagtcatgacattaactctcataaaacaacagaatcttgtcccacatttgcagtattcagggatgtgccgatgaagagagagacataaaataatctctgtcaggtcaatttctggccatggaaataattgaacagaaactgcatggatcactctgacaaggaagctggtccttaccaaaatattttggaaatgtcaccacgcaattgaataacagcacctttcagcaagcaacatcagccaaggcagagaagagagacaatctgatttcgagagtgacaatatcataacatccaaaatacccagatctcaagaaaagtttacaaagcagacaaacataaaagaaagcaagacccactaaaaggaaagaaataaatcaactgaatgcattcctcaggaagcacaggcattgcacgtgctacacaaacacttcaaatgaactgcccgtatatgctcaaaaagcaaaaggactccatggaaacagaactaaaggaaagcagggaaatgatgtttgaacaagcatgaaatatcaataatgacaagttttataaaggaaccaagcagaaatactgaaactgcaaagttcaatagctgaaatcaaaatctcaccagaggagttaagtagtggtgtgagcagacagaagaataatcggtgaacttgaagatacatcattgaaattccacaggatgagcataaatttttttagaaaagaataaatgaacaaagcctaagagacatatgagacaacatcaagcatatcaatattgctttatgggagtttcagaaagagaagaaaaacaggaaaggaaaaataaaatacataaagaaaaatagctcaaaacttctaagtttgatgaaagattagaatctatactttcgaggagctcaataaactccaagcaagttaaactgaagtctgcagtgagacacattctgatcaaagcatcaaaagccaaatacaaaaggaaaagtgtaaatagtaacaaaaggagagttggggtagctaaagcaatttcagacaatataggcttcaagttaaaaatgcttacaagagacaaagaaaggcgttataattgatgaaataaccaactagtcaagaagacagaataattatgcaccaagggatagcacttcaaagtacataaaggaagaccaatttgaaaaaaaaaatatgtagatctataatataacttggagacttcacttctccacttttactgaccacctaggccgggcatggtggctcacgcctgtaatcccagcactttgggaggctgaggcgggtggatcatgaggttaagagatcgagaccatcctggctaacacagtgaaaccccgtctctactaaaaatacaaaaaaaaaaaaattagctgggcatggtggtgggtgcctgtagtcccagctactcgggaggctgaggcaggagaatggcatggacccaggaggtggagcctgcagtgagcagagatcacaccactgcactccagcctgggcaacagagcaagactccatctccaaaaaaaaaaaaaaaaaaaaaaaaaaaaaaagataataagagaagagacacaaataagtaaaatcagaaatttgggacaatagtacaaagcttatggaaatttaaattataatagaagaacacacaagcaattgtatgccaaatcttagaagatatggacaaattcatagtaaacacagattgccaatctgactcaagaaaaaagagaaaaaaatcaacagaaatatagaaaataagggatgtaaatcagcaatggaaacttccgaaaaaagaaaaactcaaaaccagatggcctcactggtaattctgctaaatgtaaaaaggagttgatatcaaccataatcaatctcttcccaaaacagattaagaggaagtacttcccagcacattcgaagaccctagcattagcctgacaccaaaggcaaacaaggatagtattttaaaaaaactaaactaaaggctaatattccttaagaatgagcatgcaaaaatcctcaacaaaataaaagcaaaccaaatccaacgttaagttaaggggaataaaggatttcaaagatggttctacataagaacatgaatcaacgtaatatatattaacagagtgacagaaaaagtgtatgatcatctgagtagatgcagaaaaagtgtttcacaaaattcacattttcctgattaaaaaaaaaacacacactcagcaaactcggaatagaaggaaacttctacaaactaataaaggacctttatctaaagccacagtgtacatcacattaaatggtggaagagtaaaagcttccctactaagatcagggacaaaacaaggactcctgcctccacaactactatttgacattgtacagaagttttagtcaaagctcttaggcaaagaaagaaataataggtatctagaatggaaatgaaggagtaaaatcatccctatttgcacagaacccgattctaaacgtacaatatcccaaagaatacacgcacagaaaaactaacaaagtgaataaacacattgaaccaagtttcaaggtacaggaacaactggacttgccacaacttttctttgttatcctgggcattagttctcttggcctcaattttatctttaaaactgggaggcttatactgcagttgagaaaaagacacaaaaagaacctgttagttaaagatggaataagtgaatctcagagggtggacataggttggtgaggtcctgtccatctctgggggcatttttctggagtgtgggaaagcatgttcccagatgtgttagcaagatactcgcaattttctcaaaacaacagacaaggatagtgtagaaatcctcccaccacaaattgtgaacagtgtgtgatgaaataaaaataacagtcatagaaaaagatggcgatgatgatgataatgacttaagtacacaactaaggtttagtgatagaaacatcaggtgttcccaaattcaatgcagcttttcttataaaatgggggcaccagtcttagttcccatatatttaggaattgagggtccccatgaggtgtcgctgcatttctctgggcttttatgtttatcacagaagagctacagcttaccctgcactctccagcccgcaatcaaaaatcatggaccaaagaacaacatttcagcacaagactccattatgggaattgaatctgcccaccctcccgaaaccatatacacctttctgtgctgacatgagaaaaccacagtggatcacactggctcaaagtgaggctggactcctttgtccccaacctcccagatgacaggtgctgtggggtcacccggaggagaaaagctctcctaggctcagtcttgtccaccagcaaggggcagcagagctgcagccaggagcagccagaggctggggctgcccaggtggagcctaaggggtaggcagccctgggaggtctacaggtgtccaaggttcagtcctaggattggaagtcaggacagtccatcctattgcttctggttacagcgaccatgttctgagggtcagactcaaacagcatcacccaggacaccgacaggagccggggcacaatgagagcctcacctgggaaatgcagccggaggcacctgggcccagatgtcagcctgggcagctcccacagtgctggaattccctggaagatgccccaaggttgaggtgctctaggagggggcccagtgggagaggatggggctcccagggctcaagtccttcacccaggatggccatctgagcatcctgccactctcggggcctcgcccctccctctccagcagtgtcctggggagctgaaccctgtcccaggcacttccagggacgcctgacccctcctccctctgcctctccttccagctcgagactgactctgactcatggggcagctcctgtgcgcaggggagtctcaggtgggtggggcggcacattcagggccccggttcctgggtggggcttcccgggcctcctagaggagatgctctccagagggaagggggttctcacctgattcaggccagagctctgaccacaaggctgtccttggctcagtgacaagagtctgctgcattgcagagaccagggaccacccaccatccagagctcacactctgtgcaaaggctgtgtccctgggatatttgcagagaccaccgggcctaaagttgaatttcccatcaatatttcatgtaaacttgtaaaaagcaccagaaaaacacactggactgagaaccccgatgcttttctggggccttttacaagtttacacaaaatactcataggaaaaaataaataaataatggaagagctgaggatggcaatggctgatctatgtggggatgggggatggcctaaaaggagcggcaccatggctgaaatgagagcagacgtccagatgatgccacaagggtgtgtggttgcgtaaatgaaccacctactcctactgaaataattaacaagtatcctgacgacacagtacgttatttagatgaaatgaccaggatgggactaagtaatgctgggggacccagagaggagggggaatatggtgggttcttggtccacctgctgctgagtcaggtttcatcaatgatctctcagcagggccaaactcagccccaagccaggtttctagaaggcccgcagccctgctgagcctggcccaggacagaccacaggtcagagaggtttgggacagtggtcatatggccagtccccaggaaggtgactgtgatcacaggcctcagaggtcgaggctaattttctgaccaaagacccaactccttcttcagtcacctgtgctgcccccacagctagtttgagtgacatctttcaatgaggagtcccagaggatagaaatttgcatgaacaccaagcacttactgccccatagggcctgggaaggaataagagaggcctggggagcccagctgtgctgtgggctcaggaggcagagctctgggaatctcaccatggcctggacccctctcctgctccccctcctcactttctgcacaggtgcttctcccaggccctgccccaggctcagtgcccatagaccccaagttggccctgccctgaaccctgtgcaaagcccagacacagtcttagggtaggacccctgggaatgggctcttgatcttcaagccccctctcctgttttccttgcagtctctgaggcctcctatgagctgacacagccaccctcggtgtcagtgtccccaggacaaacggccaggatcacctgctctggagatgcattgccaaaaaaatatgcttattggtaccagcagaagtcaggccaggcccctgtgctggtcatctatgaggacagcaaacgaccctccgggatccctgagagattctctggctccagctcagggacaatggccaccttgactatcagtggggcccaggtggaggatgaagctgactactactgttactcaacagacagcagtggtaatcatagcacagtgacactggcagatggggaagtgagacacaaaccccttcttcatctattttaccctctccctccagccccaggaccgctgtggaccaacccataagcaggtctggcagaattcacctggttaggagatccttaagctgcttttccctccactcctctaggcagactttgcaggaatgagtcaggagtggatttgggcctggcagggccagactgccctgtgtttccttgcccacggtttgagttgtgaatggagagtatgagtggaaagacagacacagcgggacatccatgcaggcatgaacagcccagagcgacaggggaaactttcagctctcagttcaatgcagtcattgttttatctcttggaagaagcatttctccagtgcaactaagactctagactcacagagcccgaggttgtgggggaggacattaaattttgctcatggatcactaaggacgtttttgagtggagccactacaatttattcattgattcctggactcatggatcctgactgtgggagaaatagtactgcatattgggcactgctgtacagcgcatgccccatcctcaaagtcattgcccaaccttacatgtttttgccatcctgctgccacagtaactgagtcttcaagcagacactgagccattcatataagccagatgccacattggtgaagatggtaagacacttgaatgccatgaggatgggcccatggttgctgtttatttgctgtgatatgagttccttggtcaaagccccctgtggaataccatcatggtgggtgaagcattctgtagtccagagataaaaggtttggcagaagcactgcagtcaaagaaagcaaatccctgtctatactaagtgtgtattctggcaagagcaaagagctatccctgccatgaaggaacagctttaatgaaattaatatcaaccaggcatcctatagggatcttcctgttggtcttcactgttggcagatggtcactcagcagtagctacagccaggtcagctctagtgagtggtagtccactttgatgagtccatggacagcctccttttctgcaaccatagggcatttgttattgagccaattgggcaatgatggcagtggttggggcagactgccaggtgtccagagagccacccatcctaccaacctgtttagcaaaatcaattccttctcatgtcagacttcacaaaatattcacataggagataaatattctcatgctttctgcttgctcacacatctctccctcagacacagttgtgatcaatattctgattgtatttcctgtgtccctgaacatccttgatcatcttccaagtccctgagtcacagcccatgaactaggaacctctgcccgtctctctttgcagatgacatgaaccaggtacactgctctaagttctgccttaaggagagtgttcctccaccactgctgttcagggaagcccagaggccaggtgggatactagcactgtccacagcagggatggctgcatgtcctgcagaaacctctgtaaccccagtctaagtgcctcctcctaggcagctggtcccagggagcccctcaggaggcccaggctgtaaggtgagaggatggccatggggcaggagttggcccgtgtctatctggccacctcttcatgcaacttatttgtccttgtgacctgatccatcaggtctcaggtacagcccagccatgtgatggggaggccactataaatggccacctcggactgggggtcagataacatccagctcattggcagcttgtgtcccatggtgagctctgtggccacagtcacaaagagcccctgttgaggcccaggagcccccccagtcttcctctaatggagctttctgctcatttagaaaaataacaatggggaggttgctcgcctacctcaggtctagggtcactgggaccacctagaccacatccatgatcttgtctgattattctgattccttgttggcttagctatgcattagtgtaaccaagccacagtgtcttaggcactaaaatgccactacttggcccctgcctaccctggggtcctgtcaaccacatcttggtatccaattcagttttagcaccactaagagaaatctatttttatattgagaacaggaaacattagttatttctattgtggaaattttataagacaatagtgtggaaatgttttaagagacattttacttagagtgaaagaccttccattaaaccactcaataaattgctccataaatggccagcccaaaccctgagttcagaccaggcacagcctcggtgttgggaccttctgggaatgggtctctgtcatcaacccttctctaccctcctgtctgcacagccctgggcctcctacatgcagggacagctcccctcagtgtcggtagccctgggacagatgaccatgatcatatgctctggagataacctcggaataaacacgcattttggaacaagcagaagccaagccagacctcaatgtcggtcctctagtataacatcgaccagccctcagagacctctgcttaatttttaggccacaaactagcgaacatggccaccctgaccatcagcagtgcccaggccagggacaaagctgactattactgtgcctcagattgtgacagtgggggcagctggcagggactcacagtgacaaagacagatggggacttgcaacaaactgtcccacttcagcctgcctctcattcttacctgccctctgagcagctgtaggtcaggcctcagaatcaggtgtcctctctggtcctcacctggtccctgcagggccggagattcgtaacagcttttccatactctcagggcctacatgtgttcaataaaacctgtacgggggaagctcgttgaagctgcaaggaccttttacaggtttgtagaacacatgagaacttcaggaatccatatagtgtcacatggctccatgtgtaattacacgtcacacagggaaggagagagctgtttcacagggtgcaatcctactggaattcgtcttttccttgcgtagaaacagcttagtggaagccgtgtctcctctggtttcctagatgagttgaccccacattgtaatggggcacctgaggcctaaggaggacaggagacccaacccctgtgggccccaggagccttcctgtcctgacatttcacagaaactgcagaggaagtgcaggcccaacctttggttccacctggggactgtcttcagggaacactgacctttcccagtccccaaattcccaggacctgtctgacctgactaggtgtgcctccagctccctgatagcttggattttatctctgggctctgggctgctttctgaggagctcactaagaagtccttggtgccaagtgcaggacttgcccctctgctccatatcccgggtctgcaggcacaggggacaggtcctgctaggtgaggctggcaccctcttccaggagggatctctcatcccaggccctagggacaggttcactgggctttcttttctcacttagaatctcttagtctttttgtttccttctttaagagtacaactgctttttggtgaaatcatgtgtatacatcaaagttaacagactactgtcacaagcgcatatatatacacatcctcttcctagatggggtaaccgtggacactctgccatagtcgtctttttgtttctctctctctaccacaagtgagactattaatagcactcttctatgcagaccataatcatattctccagttgcacaagaacgattcttatagttgctcaatttccttgcctttcaggaccctgaagtttcccatgcccacatttggttgccatgtctctctgatccaacagtattccttggaagccgaggcttatgaaacattttgcaaaaagttccacaagaaaactcaagttccttgtgcacagttggaccatgttcattgtgtgcagtagaacctcgttccagtgttgagtccattttatgttttgaccatcaaagggaagggcattatgacttttggggactgagtcgatggaggaaagatagcagtcgatgatgaccttatgcactgacgtgtatgtggccaatgtctatagatggatttggaacttgaaggagctgttcgttctgcagatggaatttccagtgccgcatctccaccacccagccactagcactcggcaggtgctctgtaagaggaagcccttcactgccaatcagccattacacaggtgaaggtgagtgagacttaatagctattaaccctcaaaacaaactgaggaataaactcaggttcacaaagtgactttgcgggaacagcctgaggaagcaagttaattagtagcagaaggttttgcccagagcaggaggaatcacaggatcactgaggacctagtgataccatggtgtggaggtgctgtgaggcatggtgacattcaagaaaacctgttctctacaaacacctacctacccacaggcacagcagacaccccagctatgccaagggctctgtcttcctctagagtaagagcctggtagcaaacaggtatcctctgaaaggcaggtgccccatcagtcagctctgcacgactgaaacaaaaggaaaattgccagagaactttccagaaaacagtcaacctgcttgtgctggtgcattgatggtgacccaggatcagtggaagtaacagtagcttaatttccccatggctgcatgatggacaccgggagagaagtgtggaggcggattaaccaccactctaagtggcttcagccctaggtaagcaggaacaagtgagggggctgagcccacttgtgtctaatcagtcccagcctcagcgactgcatcctggagaccaacagggagtgtatgcgctcagcccctcccagattgctgagcataagcaagaaatttccctccgcacacctgacgcaccacacacctgcccccagctcctcacttacaagacaatatcaaatcagacagggactggtctgggtcccagatcccctcaggttgccgctgtcctctcagatccccacacacagcagactcttcccctcacactcctgttccaggttactcttctccaatatgatgggggtttgctttcattgtttctgtattttttgtatttttatgggtaagctgagccccttttacctggtcttgagtcaggcaggggccacacagagaagaggaattcctccccaggggccagcagtccacggatcaaggcatcagggacctgagcagtaggttctgttcctatgcctggacccaggaggcccatgagcctccagcagtcagtatggagcagccaccaggggggcagcaaagagtcacctgggaaagccacctcgggatggggtggacctgggcatcagggagatgctgacatgcagggagggtcagtgaccacgacctgacacctggagggaaaataggtccttctttttctagagtgttgtccttgacactgatgtaaaaattctagcatcaaattttatcttcagcttttgtagatgctcctatttccctgacaaaggtccaggcacttgacttccccacacatcctctcctcacacacccagttgtgctaaaatgctgtccctgtcatgcacagtgtccttcctgaggtgacacgtgtccccctccctgccctttgctctgggagcccctgtcctgtagacacagcagcttcttcttccctggctgctccccatctccactgtccctgggctttcccatctgtctcctgggaaagctgccaaatcacaggtctcaatttccttgtgaggcacaaaatagttgctcattaaccttctgttgacttaattaagtttttaattccttgatttgttttccccagcaactgaagacaacttagtcataataaacattcacttccaggggtcttgcagtttgctgacccctctcattctctcatggagcaaacattttcttgacctccttatctgtcattggtcctcacagcaccctggggacactgaggcacagcatgtacgacctgccctggagctcacagccaacgaggaaacttaccgcatcccatggatcttccaacactccatgtgcacttggcaaccaagaaattttattcttctctagcactgaggagctgtgccctggggtggggtctgtacctatccaaggcacatgctgtcacctgtagagtgtggatagagggtccttgcattaggttctggaaagtgtcttcaaaaacggatttaggcctacacccaaaatctcctctctggcacaaattattcatgatcaggatacatctagaggcctagaccaaaattcaccacctccctcctgagccagaatggaatggaggaggggactggggaccccagataatttccccatcaccactgtgactctatggccacctcctgcaacagttagggataatcacataggaagggcttcatgtatcctaggaaaaacacccaaagtcatttatgagctctaccatgaccaagtgagcccaggagtcgggttgagcacagcgtggtgtggagatatctgcagagaccgtggaaccagtttgtaaaggagatcctgtaggctgagggtgagagtgcaaggccactcctccccctctctgcatcctttggggctaagcccttctctggaaaccacaaagctcctccagtagcagcccttgactctgctgatttgcatcacaggctgctctcttcagcaaggggataagagagggctggaaggaacctgcccagcctgggcctcaggaagcagcatcgggggtgccgcagccatggcctggaccgctctccttctgagcctccttgctcactttacaggtgctgcccccagtgtcccagccacctacccagctccaaggctctgggtccagcctggcctgacagtgatctcagcagggccctgcctgtggtgtgcaggatgctcatgatcctgctgcagggggaggggctgctggaggtgaaatccccccacactgttcttctgtgctcatggtcccctgaggacacttctattcctgaaactcaggccaggcaggtgggaaggcattgttgggttgagcctctcagtttcaagtctattctattctctccccttttcttgcaggttctgtggcctcctatgagctgactcagccactctcagtgtcagtggccctgggacagacggccaggattacctgtgggggaaacaacattggaagtaaaaatgtgcactggtaccagcagaagccaggccaggcccctgtgctggtcatctatagggatagcaaccggccctctgggatccctgagcgattctctggctccaactcggggaacacggccaccctgaccatcagcagagcccaagccggggatgaggctgactattactgtcaggtgtgggacagcagcactgcacacagtaacacaggcagatgaagaagtgagacacaaaccctttcgccatctatgtcaccctctttctctaattcaaggaggactatgaacaaagccttacgcagatctggttaaattctctttaatctctgcccccagcctgtccctccctccagtccttcaggcggggtctgcagaaagtgcatcagtagttcatttagggtgatgtgatcaggatggactggtgttttggtgactcagctgtgacttgggaaaatagggcctgcatggaagatcagactgaggtagacatccacagttgtctctggatttccataggtggtgacaggccagtccttgccccaaatgtcctagatcagtccccagaactgcccagctcaggctcctgtggtagcctgtcattctttagagaaacaccaatggagtagacactgtgggatctgcccagatcccctgttctgagcttacccactaagcactactgggagcttctggcaggtcagagctgtgtcctcactggaaagtgctgttcggtgcagaaaacagactcctccaggtctatgccctttctcagtgaggttagatttcatgactgcctgaggccgagttctcgactctgcctcaatataggaagacctgaaaatcctcccagctccacagctctctgtaggaaagacttgagacctcaatgagggtcagggtctcctgcccagggttgcctccctcacctcctttcacatcctctgtgcatgcaattcctcatctcagagtctgcttccagggaacccaattaagatcaccagccatccccaacatgggccatgtgggacttcaggaggccactgtatgctggaaagcacctgtttattcctaaattagcactgtgagtatccacacgcccaatgagatctgagtgtttcttgcatttgcatggaatgagaagggagcctgactcgccaggtgctctggggtctaagggagagttggagtcagatctccctgcagggaaacctggggcaggaggagcagccttaccccatgcagggaccacagatgcacccacagggtgagcttaagtatggacactgcctacctccaccctccacatcctgtgtaaaaaatcattctttccacccctcctccagcctatcaaagttgacacttaaaaagccaccacaacccacccttgtcaacaggaaacccattcacatctccatcagccacacaatctccacataaagattcttcaaaaaataataacaatagccatgcaaagtatatgatatatatcataaataattgtacttagattatatatgaaaatgatactctttttgatatgctaggtaaataaaatacattatttaaactcattgacttcttctctttgtatttataacatgatgactagacagtgggattcccatgaggctcacatcacattgtgattgaacaaggctggtctgcagggcttcaggttacaggggctgtggagtgacctggtgcaggaagccccgtctccatccataggacatcagtgtgaacccagggagaggcgctggtataagagagatgagaacacaggtgtgaaccacctgcttgtgcaggggactgagccttcactttgagccaaataagttttctttcccaagttcgatcctgaacaagagggctttctggacttctttttgttttcaggtttgtgccccttcaggtttggggctgtctggagtcccagccaggggacagtgaggaaatccagcagtctcacactgactctgttgtatttcatctgctggggccatcccaaactgctgcgtaccatttcctttcctggtgctcaaatagctgctccatgcacttgtcatggttttatagctcaatctagatgggaagacaggatagtgtatgttacaatatttaaatagaacctgaatcccttaatagttattttaatatggaacattaaaagagttgcatcataggcaatggggaaagatgaagaaagattaaacgcatttggaggaaaaactaaaaatgtctttattgaatgtctgtgtgtcttcagtgacgaagggttgagagaggtcagctttaggttgtcctgaggatgtgctcagatgggggaaagtaagaaagcaggaaacgtgcatctctgtgacctgacacataaatcacagtaaaatggaagtaaatctttcaataaacctttcaagataacatcactctggtgcacatagaaaggcctgttagcaaactttcccttttccctgctggctcatatccccatggatcacctgtatgcagaacggactctgtggtctccatttatcaggctgagaaccagaggctgggaaggacaagtcacctgctcatgagtgggaggggcaggattgggagcagcggactcaggctcaggactgtggccctggttggtgctccttgttcccttcacagggtcccacccacatgtgcccgtgtggatgtgggtgcactgcctggggtggctgatgtgctccagggatttgatggtgcagatgcttcaggacaaagcatgggagtggggatgggacgagctgccgctgggcagaccaaggaccaacgccacccagcagaggcttccagtggggttgggcagccccatttcctgagaatagagagaacctggcaatgagtgccagaaagaagttacttcgaggtgtgcccaggcctggagggtcacagagacacaggcaccacacagcagagacactgaaggccaagagctcactcaggtgaagggcttcaacagatttttctctcctgagcaaatcacgtgcaaagaaatcaacttcctgtcatcagaatagacaatcaggactttagtctccttggctgagccccgctgtcaagggaagcagaagtctctaagcccaggcccaagtgagggtggggtgagaagaggagctcaggatgcagatttgcatggaggtcccgcccttctctgaggcagagggataagacagggctgggggcaggcccagtgctggggtctcaggaggcagcgctctcaggacgtcaccaccatggcctgggctctgctcctcctcaccctcctcactcagggcacaggtgatgcctccagggaaggggccacagggacctctgggctgatccttggtctcctgctcctcaggctcacctgggcccagcactgactcactagactgtgtttctccctttccagggtcctgggcccagtctgccctgactcagcctccctccgcgtccgggtctcctggacagtcagtcaccatctcctgcactggaaccagcagtgacgttggtggttataactatgtctcctggtaccaacagcacccaggcaaagcccccaaactcatgatttatgaggtcagtaagcggccctcaggggtccctgatcgcttctctggctccaagtctggcaacacggcctccctgaccgtctctgggctccaggctgaggatgaggctgattattactgcagctcatatgcaggcagcaacaatttccacagtgttttaagtcaatgaggaagtaagatcaaaacctgccctgggctctcaggccccttcttgctctgcagatgcttcctcacgctgtataagggtttcctgcaggatggccttgacaattctcctctctcagctcctctcctttcccaccatgaggtctaaaaggaaacctgctcgtgatttctcgttcaggactgtggcaacttccttttgcttgtgtgctctggtcccttaacgtgcaactattcctagctcttcaatgcagggacgtagggacaaggagtttactgcttggtgcagtccctcctgttttcaggaacatcctcattctaaatgcatcccccatctgccacactatgcagatcaatctggacagaagccatcagggggatggcttccagtttccaggaattgcatcttgttccactctgtgtccaccacgctctaatgaagatggccctcctagctggtctattcctctgcacctgggtcctgaagcagtgaccactttaagaagacttgaagatgtttttgagggattaagaacaaagaggatgctgctgtttttctttttattgctcctgctctttgccgaaattcctcaggttgctgagctggggagattttgagtgacaggctcagtgctctcgcagaattctcctcccctcacatcgctgaggccctgtcctggaaactcctcacaagtggacggtcttcccataggatgggggattccaaaatggctccacaggaaagagttaacctgagtccacctcccttcctcatggacatcgagcatttctaattttcatggctgtcaatacttttgtacctggaatccctaataatctaatggtgagaattgatttagaacacattcggacattagctgggtccaatatttaaattttctgagccagttgttaaatacagctattatcatatatagtttaggctccttaaacttcgattatacagattatatttaaaacaaagtaactagtttactatatatatttacaaagtaactactatataacatcatgttgtgtacctgaaatataaacactaaaatttatttcaaaaaccaaagtgtattgtctattgatgcataaaaaaacactcacaaaacttagcacactaagagaacacatgtctgtgaccttgtgacttggatgcacctagaattgggagtagcttagtttggtcattctcgctcctggttaatcacgaggttgcagccaagctgtcaggccaggctgcattcaggctacatctgccaaagaggttaggaactgtggaagcctccctctggctgtggaagcctccctctggctgtggaagcctccctctggctgggagacttccgcagttcctaacctctttggcagacgtagatcatctcaaggataaaggagagagtggagtgaaggcccctgtccttgtcctccatgtaaaaggccatcccatgcatgcactattttttattctttgctgagacatcctaggcatagagcactgccccattcattcaaaggttgtagagtattctatggtagaattttagccaactcacttttaatggttattatcactattttgatcttataaataacactgcagcgaacatccttatgtagactcctttgattttatatgtagacatgaccatagaataaatttctagaagtcaaattgctgagtcaaaaggatgtgtgcttgtaattttcactcactgtcctcagattctcctctagaggggttatctacaaattcgcaatgtcagccataaatattcgaacagagtacactggggaaagtttaaatgtttttcaacctagcagatttaaaaatgttatctttttttagttttgatttctcctgttctgcttgaagttgagcattttctctaatacttcagtgctatttatttttataatttggtaaacattttcttaaatgtccagataagaaggattttggtctgtggttcccaagagtcaactttgaggatattctgtaggtatttttagcaccatttatagtgtaaccatttaaacctataaaaaccactctcagctctggggccatggaaaaacaggtggcaggacagggatggcccacaggatgtggtttaacggtccctgatttgtagggtaatttgaagtttgagaattccaccgcatatgttctaggtggagatctctatttgaaggatactgtattttacctcctatagtggcctgaggcttttggataagaacatacttgtatcatctatttaattggatcttgggtcttcccaggacagccctgtgtcacagtctcatgtttttcatctcatccatttgctctgagttttcagaaagctttagtatatcagaaatagactgaccctaggtggaaaatcagaggtaccgggagcagcaaatggtcagggaagcttgcaccaactctggaataaaccagtacaggctcagagaaaaacatcataaaatcagcattgtagctgaaaccaaaaacatgcatgatctttgaagttctggggattataaataaataaatgaagtttaaggtttaaatgtgttgcaaatttacataaagcatgtagattttaaaactcagaatgcagcaatgaaatatggaagcttgagattttaagctgttaaggccctacaacaaattgccaggaacagaacaggaacttgatagtcataatgtcttatgctggaaattatcattttctctaaatgaaatttttttcccttttttcttagacataaggaaacatctcattgaacacccttcttttccactgtcaaacacccttacccagaaaggaactgtaacattaagtaggaaacaactgctttttttcataactattgagagatttctttatttgcacatcaaaatgttgattgtcaatgctaaaattggaattagtagtttaatatgcacacaagagattaattttgtttggattatcccatttctgtctattatttgtcttagttaactcagacatattctgcttttggtattttttgttttattttctttgccaactacatgtaaaccaaaaataaaattctaatgctcccccaacaaccccaccatctgagtggactctcttctcttggtgggggcactccaaagttaatctgaaagactggttcaggccatggcagaaaaggggtgtcagacatgtctcattaagcccttttcctttttggaattcaggaaaagccaacctgcacttaacatcaatacaaatcttaagtctgataagaaacatttacaatctattctctctgaagcctgctacctggaggcttcctctgcatgataaaactttggtctccacaacttattataacccagacattcttttctattaatactttcaaccaactgctatcagaaaaatttaaaatctatctataatccagaaggccccacaaccctgcctcccatcaccctcttgttttgacttatcctgcctttctggactgaaccaatgtatatcttgaatgtatataattgatatatcttgtctccctaaaatatataaaaccaagctgtgccccaacctccttgagcacaagctctcagggtctcctgagggttgtgttcaccagtcatggtcactgatacttggctcaggataaatatcttaaaatattttacacagtttgactctttgtcaacatatggctcttttcaaaacaccatttgacacccagacataacccgctgctaatgattacaaaattcaattttattagcatttaaattattactttaaattatttcaagaatgcatggatgtgatttcccccacatctaactcacaaatgttgctgatgctgacttgctcttttctttcagtcttagcaaataaagagggagtttacttttcttgataccagaagataacaggagaaagtaggtgaaactcccgaaagctgttatcgtttccaccctcaggatgaatcacacaaggagtcacctgcacttcatttggatgataaataaatgagatggatcttagagttggtgctgatctagtcaatgatttgggatgttgggctgaggtgaatgtgtttcacaggtgagaaagacatgagttttagagtccacagtgtggagggttattggctgaagtgtgcccgagaattcatacaatgaagctctaatcacagtgcatgaatgaattggaacataggtctttaatggggtgattaagtgaaaatgaagccagtaggatgggttcttttccatctgacaggtgtcctctgaagatgaagaaatttgagcacacagaaatgagacaccatagatgagcatgcagaggaaagatcacgtgaggacacagaagaagggagtgatttgcaagccaaggagatgttacagtagataactaggcagacgtgacagggcaggagaccccctgccccaggaatgtcacgcaagcatcagatgatggtcaggtagttgttaaactgtctctgtgaattaataattagtcacagccggcaccaaggaaaggcggtctcccaatagatagaaaatacctgaagctggtgatcagcagctttctgataagatctcaggccttgggtgagtgggctcaagcaggcaaactaaaaggcaaaacagaggccaggcatggtggctcacccctgtaatcccagcactttgggaggccgaggtgggccaatcacttgaggtcaggagctctagaccagcctgaccaacatggtgaaaccctgtctctactaaaaatgcaaaaattagccaggtgtggtggtgcatgcctataatcccagctactcagaaggctgagccaggagaatcacttgaacctgggagatggaggctgcagtgagccgagattgcatcactgcaccccagcccaggtgacagagcaagggtccttcaaaaaaaaaaatgcaaaatagcagagtttaacctggatctgagactcccatgctgcccttccctccagccctacaggcaggctctgcagagagtgaatcaccagtaaatacacaaacaaatatgattacgttccttttgtttaagaagtagaggaatgattgaatatattaagtgaaaataaggaataccaacacaaagaaaaatttaactgtaagtatggttaaaaatacactgggtgagatagacaagttagatgtcgcaaaacaagagattagcaaactgtatagtgtaacactagaaactattcaaaatgaaacacatagcaaaaaataacgataaaaataaacagcatcaatgagatgtaggagaacttcagacaggctaatatacgtgtaattgaagtcctcagaatagaagatggggtaagaatgaaaagaaaaaatatttgaatgaataatgacaaaatatgttccacatttggtgaaaaccataaactgatataacccagaagctcgataaaacttaagcataggaaacacaaagacaacaactccaaaacacatcataatcaaattaataaaatctagtgatgaaaagtagtcatttaggacaaaactacaaagagcagatttctcattaggagcaatgcaagcaagaagatagtgaagcaatgtcttgaaaataataacatgcaaaatccaacaaccttgaattctttatccaccagaaacatctttcaaaactggaggcaaaataagactttttcagacatgtgaaatcctacagaattgatcaccattagactctcgctattagaaatgataaaggacacccctaaacagaaagaaaataatcctacattgaaatgtggtttgacacaaagaaatgaaaaatcagatatggtagctacctggatcaattagaaacctctgtattatgtaatgtctataaaaagaacagtaatgtctataaagagaactgttcagagaaaaattaataagaatacactatgatttgtaataaaaataaaagcaaactatatgacaaagcagaaaagcgaaggtgggtgaagaacatgtaataatggttttgtactatatgtgaatatataatagcacctgaaggtagattttggtaagttatgtatttactgtataccctaaaacaaccattaaaataaaaccctcaacaaaaaagaaatatggctagtacgctatattagacttgtccaccaaaaattaataggatatgtatggatatgaatatatatgtataatgtatctatatggtgagagagacagacagaaacttattttaagaagctggttcatacaatagtggtggctgatggacaaaatctgttgggcaggctataggctggaaatttaggtaagagttgatattgccgtcctgagttcaaattctgcaagaagctaatgtttccccaagacagcatcagctgttattatgcacactggctccaaatcgaggaaagtgtcccccctgaccattagcagagctcatgccaagaacaaggctgatcattaacatcaatcactgggaaacttcagtatttattctaaaaaccttgaactcattaatgagactcacacacattgtggaaagtagtattgatacaggagacagaaattatttaggcagatagtgagggtgacagggtcctcagcagagcttctcatctaacaaaaagcagccctaaaaatcatttcttttataacaaagagcagcctgaaaaaatcgtgctgcaaacatagataagcaagctggaagcttgcatggggcaatgccagcagctatgccaatagaaaagtactacctgggggtcagccatgtccaacatggaggctccatcttccctttttttgtcaccatgtgtatagcaatagagaaatgggcaacatggagcagctcaggcagataacccacctgcgtaataacagattagggcagggttggccagaaatgtgcaccctatgcaaatggtacacctagtcctaatcagtttttcatgccctgtgcaagtagcacacctggtctaaccagtctttgacacccaccttatgtagatcagatactgcctcctcaccagctcatctataaaattccctacatttcactgcagatccggcaacccatttttctgggtcccctctctgcagcagagagctattatctttctttcacctattaaacttctgctgtcaacctcatttgttgtcagatcatgtcctagttttccatggccctgagacaatgaactttgagtattcaccccagacaatgaggctatttcaatatgcttatacaaagtctactggtttgaatatttatcacatttgaaaaatatcttcatgacaatgtctacactggtgcttaacaaaatcaacctggtaccatgtcttagccaatctgacacttaaaattcaccaccacttaagccaggagctaaagaaaaccaatttttaaaaataaatttcaaaagagagaaaaaggaaagaggaacaatgaacatataagacaaatagaaaaaaagagcaagatggtatattttaacaaagtatattcctaatcacattaactataaatggtctaaataccacaattaaaaggcaggtattatcatctatattctaaaggagttcaggtagggttggtatgctttcttccataaaaatgtgataccagtgaagctatttgggtataggtgggcttttcttagcacggagattttaaattgctactttaatatctttaagtgtcatagacttattcagattttctatgtattcatgagtcaattttcataatttatgtctttccagaaattttacttcatttatctataattttggcatttactgttcataatattccctataaccattctcacccttttagtgtctatagtgatgtcattattttagccatggttttggcaacttgtgtttctttttcttttttttatcatggtcactttacctaaagataaaaatctattgattttattaatctttttgaagagccaagtgttttttttttttttttttgaggttttctattgttttcctattttctatttcatgaatgtttggctgtgatccctattattaccctctattcacttagaatttgaatgttcaccttttttaggtttatgaggtagaagcttagattattttctttaattctttcttctttccaatactaagcatttaatgccatagtttttcttcaaagcagacttagctgcattccttaaattttaatatgttgtgtttttatgtttaaaaaggttcagtatcttctaatttatgttgtgatttttctttgattcatggattacttaacagtctgttctttcactttcaaataattgaagatttcctatggttcttccggtattaattcaagttaattagttaattctgcattaaattatatcttctatgattttcatcctttcaaatttatcaatatttgatttatagcctaaactatgaactatcatgaaaaatgttccatatgtatttgaaaagataacatgtattctgctgttgtgggtgcagttttctacaaatttattataattaagataacttggcaaatggttcaaatctatattcttactagatttctgtgtagttattttgtagatctctgagacagagctattgaaatgaacaacacaaactgtagaatttcccaatgattattttgagagagatcatttttaaaatcatggatctaaataatttattctcctcacaaaatgtcttctatgatttccaaatactaatcaagggaagaaggcagagttaaactcacacttgtagataccacgggaacagtgagtgatcatgtgatgtgcctccagaggttaggctaatgtagttagagtggtttatatttatttatttatttatttatttatttatttatttatttagacagagtctcgctctgtcacccaggctggagtgcagtggcgctatctcggctcactgcaagctccgcctcccaggttcatgccattctcctgcctcagcctcctgagtagctgggactacaggcacccgccaccacgcccagctaattttttgtattttttagtagagacggggtttcactgttagccaggatggtctcgatctcctgatctcgtgatccgcccacctgggcctcccaaagtgctgggattacaggcgtgagccaccgcacccggctggttttttttttttttttaaacacacagttgggctaaaatatccatgaaaaaatttgaagcatgtaccttgaataaaatatgaaaatcaaaaaagttaattgcacacgtacaacattgttaccacggtgcctgccgcatgggaaatgaacaacaagtgttattaattcaattctattttcttacacattcaatgaatatgtattgaaacaaattcactgaatggtcccagatactgaataggtccttgagatgtactggcaaacaagacaaaaaaaaaaatacatgttctccgggtggcctcatggaagatggtggagtaagaagctccaagaaatggtccctcctgtgatataactattgaagtggcaagaaccatcagcattcactctaataaaactatggtatctcatcccatatttgcagcatccagggaagagctgaagaagaaagagacaggcttaaggaagtctctgtcaggtagatctctgaccacagagataactgaacagaaatttcgtggatcactctgacaagaaaggtagtccttgcgaaaatattcaggaaaagtcacaacacaaataaacaactgcacccctcagatgaacaactgcacaatatcagccaaggggcataatctgataatctgatcctgggagttaacaacatcacaatattcaaaatactcagatctcaacaaaaatttgcacagcatacaaagtcacaagagagcacgactcattcccaggaaaataatcgactgaaaatcttccttaagaagcattcatttgctcccatcttctcccttggttatataacacgtccttccacatatacttgattagagcttgtgccccacaaacatgcctggcatgtacattagtgacttctgagagggaggtgggggcaggaaacagtccctctggatacatttcgcatcacatgaaccagtgaacacatctctgcaaggtcctgcattctaataaacaagatttttctgtttaaaagaaaacttaagtctttcagaaaactgcatttcaaaagggaaccttgtctctgctgcttgggctgcagtgaggacagatttactaagtgctggttgctgtgttttgtcttctagtgtgggtacacacatctagaaaagttttaaagaagattggggaacccccacccagcactggtgggactttgagtttgctacggttgtgaacagaacatggaacagaggacaaggtggcccctcctgaagatgagagttttgcttcttgctggaagtccctggactcctggagtgttctcaggggacctcttaacaggatctcaagggaaagaatccagggtactggatccacacaatcaacctcacggatttctgagtaggtcattaacctatcatgcctttagcgttatctcaaattatacatggtatcatctcaactaatgtctaaaacaatatacggcatagatatctaaagaactagtggtacatggaggatggctttctacctctgagccctagaagggactgtgggccttggtttggggactctaatgactctaagtcccctggtagtgctcaagtgcaaagggaatgactgacgctttttttgaggccccttctattgtgtaaaatttattctgtacttgtgacacccacctggtccttcttctgaacatgggaaattgccaagatgaagtctccaggctaacggctcagacaggagctcagataaacatgctgggaagtggagagcaaattgacattcaaagctcctcccaacaagcttcaagaagagggtaacacaagaagtccttgtaaccaggttccacggggcagcctcaagcagagctcttggaagtccctcccaccacggtctgggtctccttctacctcctgcccttcattttctccacaggtcagaacatccagggaattcagggaaaccctttcactgctatttctccacaagctccaatcctcaggggcattctttccagttctcccgagcattcggcatcattcatgaaattctatgtttccaggtctctgtgctctggctgtgctaactcagcccccgtctgcatctgcctcactgggagcctcagtcaagctcacctgcaccctgagcagtgagcacagtacctacatcatcaaatggtatcaacagagaccagagaggtccccctagtatataatgaagtttcacagcgatggcagacacagaaaggaggacaggatccccaattgcttctcgggctccagctctggggctgactgctccctcaccatgtccaacctccagtctgaggacgaggctgagtatcactatggagagagccacaagattgatggccaggatgggtgagccacacacagtgacacaaagggaaagtgaggccaaaaccccccacctcccctttctcctcagggactcagagtcagcagtcacatgtccccttccaagtccctgagacttctgactctcctcctgcagagacacccctaggcagaggcagatgcaggccatgatttaggccattttgacaactcatcattctgtctcctcaacaccagtctgtggggaccatactaggagagaccagagcagcccaggcagaaggaccctgagagagtggccaggctgagatgaccgtgtcccagtgtctcactgtgccctgtgctcccttaccgggctctgccccaggaaaggacatggatcttgacctgtcaccccccatttatgagagttcaatgtgtgtgcatcctcgttagcacttgatattgtcagtttttccttaaagtctttcagatagagctgtagcgatatctaattatgtttttaacttttatttctttaatgacttattatgctaagtatcttttcaggtacttatctgtcctttgtatgtcttctttggtgaaatatttaatcaaatctttgcatttttaaaattcaggtttctcaggttcacatttcctcatgtatttgtatgagtttatatgcatgcatgtgtgtctatgcattccattctgtgtgatttcccaacatgtatcagcacaggtatccaccactacaatcaagacacaaaccaggtccatcacaacatttcctggtgtttccctttgataatatctacctcctcccacccagttccctcccttgcccaaccctggcaaccactgatttggttccctattcctaaaattttgtcttgcaaaaacgtgatacaaatacaaccctattgtagtagacagactttggggttggaattttttacttagcatcattccctataaagtcattggaaaggtgtgtgtatcaatagtcagttcctttcaattgctgagcagtatctcttggtattagtttaacaaaacctgatgaattactcacccaccgaagggtatctggattgttttcagtttggagctactacacctgagggtgctacgaacatcagtttgtatgtttcttgtgaacataagtattcagttctttgaaatgaaggtccaatattataattgctgtgtcatacactaattaggtctttagttttctgagaagctgacaaactgttccctgaagtgaatgtaacatttttttctggccagtaatgaaggaatgatcaaatttctctgcttctttgggaattgtgtgtttttactctttttttaggtaactattgtgataggtgtgtagtgatattccattttttaaaatttcatgtctctgatcgttaatgatgatcaccttgtcctgtgcttatttgccatctgtatgtcctctttgatcacgtttgtgccctttgcacattttctaattagattgtcttttgttttgctcttaactggtattcagtgttgggtgttttgtttttttgagacaggattttactttgtcattcagcctggagtggagtgatgcaatcacagctcactgtagcttggactttcctgactcaagcaatcctcttgcctcagcctcccaagtagctgggacaacacgcacacacactgcctcactaatcgtttacagaattttctttgtagagacaagatctccctatttgcccaggctggccacgaactccttaggctcacgcaatcctccctgctcaacctcccaaggtgttagaattacaagcatgagccaatgcactcggccagttttcactgttctttatgtattttttatactagtcatttactggatatgtgattggcaaatacttaatgccagtctgtagcttctgttcacatcctctcaagagagatttttgcaaagcaaaaattgatggttttgttaaggttcaatttatcagtctttcatttcatgacttgtgtacttggtgaagtctaagaattctttgcatagacatagatcttgaagattttctccttttttttttctttttttttgacagagtctcgctgtcgcccaggctggagtgcagtggcgtgatctctgctcactgcaagctccacctcccgagttcacaccattctcctgcctcagcctcctgggtagctgggaccacaggcacccgctaccacactcggctaatttttttgtatttttagtagagacagggtttcacagtattagccaggatggtctcgatctcctgacctcatgatctgcccccttcgacctctcaaagtgttggtattacaggcgtgagccaccgcacctagccgattttctcccatttttaatataaaaataatagtatcgctgggcacggtggctcacgcctgtaatcccaacacgttgggaggccaaggtgggcagatcacaaggtcaggagattgagaccatcctgacacggtgaaaccccgtctctactaaaaatacaaaaaattagccgggcatgatggcaggtgcctttagtcccagctacttgggaggctgaggcaggagaatggcgtgaacccgggaggcagcgattgcagtgagccgagatcgcgtcactgcactccagcctgggtgacagagcgagactccgtctcaaaaaaaaaaaaaaaaaaaacagataaataaaaaataaatctgagagatggctgagcaatttcactgagtttcatcatggaattctggcctcccaaacaccagcatggcccctgttcctacaatctcctgcttcaagatcaacccaaccctgctacccagaccagatgctagatggtcaagacagggctgtgagagctaaagaatcttcagggtccacgatgaatttacattggagcttccttttccacggatattcacatcaatagagaagatgactgagttcttgcctacctctgtgaatacctgagacatgaactgagatgtgtgtgtgcatatggtgcgggcagcacttcctcactcaatactagggagagtgtgaggaaactggatacagacctggagatagggcacatttttacactctctattaagccctgtccttctgtgctcaccaaggagtcacccaacaaggccacaacaggaagagaagcaggtttctatgaagagacttctctttttgtgatgagggcccaggaagtccactgtctagctatgaactcagaggcagaactctgatgcatctccaccatgacctgaatccctctcctctactcacccttcctgctgtcggcacaggttctgccttccagggctcagccccataagactagggatcagcctggccctgaccttcagctcagcacagggagtgacgcagtgtgtggggctctgagaatgagaccctcatcttcagactcacctctcctgtcctatcttgtaggctcagtggcctcctctgagcggactcagttgcctgcagcgtctgtggctttgggacagagggccaggatcacctaccagggagacagcatagaatacttttatgcaaacttttgtaccagcagaagctaggacaggtccctgtgctggtaatctatggtgacagcaactggcactcagtgattcctgaacaactctctgactccatatcagagaacatggccaccctgataatcaatgggccccaggctggaaacaaggctattactgtcaatcatgagacagcactgatactcatctcacagtgacacaggcagacaggaaagtgagacacaaaccccttcccacctatgtcaccctccccctccaacctcaggaggacagtggtcagagctataagcaggtctggcccagttcactcagatttgagacccccaggctgcccttccctccagccttccaggcaggctcagcagagtgtaaattaagagtggatacacaatgaattattagaattgtatttcagtttttcaagaagtagaggaatgattgaacatgttaagtggaagtatagaataccaaaaaaggactaattgagcttgtactgctaataattacagcatctgagacattaaaaacacactggatgtgattaacaacagatgatgcaacacaaaagattagcaaactcaataatgtagcactagaaaatattcaaaatgcagcacataaagaaaaaataatgatgaaaatgaagagagtgttacagtatatttatagaaaaaatgaagagtgagttataggacaacttcaaacagcctgaggttggctgggaggggtggctcacacctgtaatcccagcactttgggaggtctcggagggagaatccttttgagactagaagctcaacaccagactagacaacataacgagacttcatctctacaaattttttttaagaaaattaactaggcatcatagcctgcagctgtagtcctacctacttaggagcctgagacaggaagattgcttgagcccagaaattcaagatggcagtgagtgaggtacgatcatgccactgcactctaacctaggacacagagcaagttcctgggtctcactctgtggttcaggctggagtgccatggtgcaattacagctcactgcagccttgacttcccaggcccaagagatcctcccagctaagcctcccaaagtttctgggactacaggcatgcatcacatgcctggttaattctttgtattttttgtagagatggggttctccctatgttgcccaggctggtcacaaactcctgggctcgagcaatcctcccgactcagccccgcaaagtgttgggattacaagcataagccacgccacctgatgtgaagaaatatttaaatacaacaacctaaagtatgtataattgacatccatggaatagaaaagatgaggtggagggtcagtagaaaatatatttgaataaataatggccaaatatgttccacatttggtgaaaaccaaaaattggtatatccaagaaggtcaacaaaactcaagcacaggaaacatgaagaaaacaactccaaaacacatcataatcaaattataaaatctagtaatgaatacccactttaaagtttaattccaagagcacatctctcattagaagtaatgcaaggcacagtggaacaatatttcgaaaatgctgaaaggaaaaacttgtgaaccttctgttatttatctaacagaaataacattcaagagcggagggtaaataaaatgttttcagacacataaaaacttacagaattgatcactatcacttttggcattagaaatggtaacagacatccatagacagaaggaaaatcatacccagttgaaaagcaaattcacacgaagaaatgaaaacttcagatagggcaatgacatggatacctatagaaacccctgtattatgttaacatctatgaaagataactgttcaaaggaaaattagtaaaaaaatcactgtgatttattgtgaaaacaaaattaaattatatgacaaacagcacaaaagcagagaggagtgaagaacatgttataatggtcttataccctgtatgaatatctaatcacacttgaagacagattttggtaagttatatatgtaccattaaccctgaagtaattattaaaataaacccttttaacaaaaaagaattatgactagtagtaacctgtattaggattctccacagaaacaatatcaatcagatatgcgtgtgtgtgtgtgtgtgtgtgtgtgtgtattgagagaaaaaagagtgaaagaaatgtattttgaggaagtggatcatatgattgtagtggctgacaaggattaaatctgttgggcatgctgaagtctggaaattcaaataagagttaatgttgcggtcatgcatgcaaatttagcaagccagcacatcaggaaatctccatatttgttctaaataccttcaactcactaatgagtcccacctacattgtgcagagcaatctgcttatacaaggtcaactaattaaaatgttcatcacatctgaaaagtatcttcatgttaactcctatactggtgtttgacaaaatcaacctggcccatatcctagcctatctgacacttaaaattaaccatcatttaagccagaaagaaaattttaaaaatatttctaaaaataaatcagaaaaggaaacaatagaaggggaaaaataacgaacatatgggatgaataaaaaatgaggagcaagaaggtatatttcagtaggattatattactaatctcattaattgtaaatggtctaaatatcacaactaaaatattgtcaaattgaaattaacagcaagactcaactatatatgctacctagaataaacctacttgaaattttagaaccacaaaaagccaaatacaaatcaacgacaatcttcccaacccctggtttcccaacaaagcattacaaaccgaattcacagggattaacacatagttaaaaaatatgtctcacttccaccaacactcttacctctcttcagcctctaatgcctagatcccagtaccagagttgcaagaaaacagggcacacaaatgttaaatcaaggttactaagggtcaccctcaagaggtaggtgaaaagagaatgagggaattgaagccacaagggtcccacttgcatggggcagctcctgcatcacaatgttgattgatacattattgatgagtttttgtccatgttcatggtggacataggtctataactttcttttcttgtcatgactttggctttggtattggagtaatgcaggcctcaaagagtaagtagaaaaatgtttcccctgctgtataatctgaagaagttcttgtaggattggtatcatttcttaattaaaaatttgatagaaatttactatttaaaactgggtgagcttttcttagcaggaagacttttaattgccaattcaataccttcaaataccatagatctatttggattttccatttcttcctgagtcagttttgatcatttatgtcttttaaggaatttttccacttaagtcatttatacttttggcattaattgcttgtaataatttccctaaccattttaacttttgtaaggttggtagtcatggcactcttttatcatggttttagtactttgtgtcctctttcatgttttcctagtcagtctacctaaaagtaaaatcaataggttgtatttatctttttgaagagccaagttttgttttttagaggctgtctattgtttttttttgctatttcattaatatttggctctgatctttcttattaacttttcttttttttgctttgaatttaaatgctcacctttagcctaaatttatgaggtacaagcttagataattcattttagatctttcttctttccaacattaagcattaaatgcaatagatttccttcaaagcactgatttaagctgtatttcttaagttttgatatgttgtctttttgtgttttaaaggttcagtatcttctaatttatgttgtgttttttctttagctcatggattacttagttgtgttctttcctgctcaaataattgaagatttcccatagttcatcaggtattaatccaatttaattaattattttggcattaaataataccttctatgatattcatccactgaaatccactaagatttgacttgtaacctagaacacagattatttcaaaatcatttaaaaatgtgctaaatgtatttaaaagcataatgggtattctgctctcatgtttgaaagtgtaatgggtattctgccattgtgggtgtagttttctacaaattcaattaggataaattggctatttgggaggctgaggcgagcaggtcatctgaggtcaggagttcaagaccagcctggccaacatggtgaaaccccgtctctactaaaaaataatacaaaacttagccaggcgcggtggcaggcaccttaatcccagctacttgggaggcagaggcaggagaatcgtttgaacccaggaggcagaggttgcagtgagcctagataaagccattgcactcaaacctgggggataagagagggacttctctcaaaaaaaaaaaaaaaaaaaaaaaaaaagataaattggctgatcattcaagtctgtatcttgattgaatttctgtatagttgttgtgtggatcaatgtcagggagctactggaatgatttaacactaattttagaatttctgattgattttttgagagaggaaattttcatgggtctaagtactttattcttctgacaaaaggccttttatgatttcccaagactaatctaggaagaaaaggcagagttcaagccacagttggtgataccatgggagcactgaatgatcatgtgaggtgcctccactggttaggtgtatgtaaatgaagattttttaaaaaactaattgggaggccgggtgcagtggctcatgcctgtaatcctagcactttgggaggctgaggcaggtggatcatgaggtcaggagatcaagaccatcctggttaacacagtgaaaccccgtctctactaaaaatacaaaaaaaaaaaattagccgggcatggtggcaggcacctgtcgtcccagctactcgggaggctgaggcaggagaatggcgtgaacccaggaggcagagcttgcagtgagccgagatcgtgccactgcactccagcctgggcgacacagtgagactccgtctcaaaaaataattaaaaaattaaaaaatacaaaacaaatctgggctaatatgtccagaaattttgagaaaatgtatgttgaataaagcatgaaaatgtaaagcaaggtgattgcatatgtataacattgctaccacaaggccaacctcatgggaaagaaacaaaaactgttagcagttcattatgtttacttacacactgaacaaacatgaattgaaaccaattcaatgaactgtcccagatactgtttaggtacttgagatgtattggtgaacaaaagagacaaaagtacctgatctcacagtggcattatgaaagatgatggagtaggaaattccaggaaatggtcctttctgtgaaataactactgaagggtaagaaccatcagaattaaccataataaaatgaggaaatctagtcccacattcgcagcattgaggcaagtactgatgaagaaagaaacaggcataagaaaatctctgtcaggttaatttttgcccatagaagtaactgaacagaaactttatggatcactctgataacaaagtccttgcaaaattattttggaagagtcaactacacaaacgaataactgcacccttgagcagcaacatcagccaagaaggagtagggagacaatctgattttgagagttacaacatcacacattcaaaatacacagatttcaacaaaaacttaaaaagcagacaaagttaaaaggaagcatgacccatttacaggaaaaagtttaatgaactgaatgtactcacaaggaagcaaaggcattggacaaatgacacaaatacttcaaataaccatttacatatgttcaaaaattcaagaaaaccatgcgagtaacaaccaaacaaaactggaagaataatgttagaacaagtgaggactatcaataaagaaaaagaagttataataaaagaacccaagcagattttctagaactgagaagttcaatagctaaaatcaaaatttcatcagataagttcagcagcagtttgagcaggcagaaaaataatcagtaaacttaaagatacattgttgtaattacacagaatgagcataaattttaaaagaataaataaaatgagcagagcctaagagatacatgggacatcatcaagcatatcaatatacgcattgtgggagactcagaaggaagagaaaaaagaaagtataaaatacatgtaaaaataatggctagaaacttccaaaattgatgaaagatatgaatctatactttcaaggagctcagtggccttcatcaggttaacctgacacagactcacagtgaggcacaatatgctcaaaccatcgaaaaccaaatacaaaagaaaaatattgaaagcagcaagagaaagagactcatcacaaacagtagattctcatgaaattaacatttggtctttgatcagaaacaaaacagtccaaaaggcagcacaataatctataaagtgatttataaaaatatattatctaccaattctgcatttagtcaaacaaatcttctaaaataaaaaataaaataagataatcatagataagcaaagtttagtagacctggtagatctgccctaccagaaacactacaggaagtccttaagtctgagaaaagacactacataatttgaatacatgtgaagaattaaagatctcttttaaatataaagctagtgctgttgtattgttggtatggagctgctgtgttttccatgttatttatgagatatatggaaaaaaatcaataattataaagccatgtacataggcacaaaatgtttaaagatgttatttgtgacattaacaaggtctaaaaggagaggaaatggaactggataggaacagaattaatggatattattgagactaagttcgtagcaattctaacaattttaaaacattaatcgttactccaatgataactagtaaaaactaaattgagtgtataagggaaagaaaatgaagaaggaatccaaatggacccagaaaaaaattaatagaacacatgggaaacaattattggggtaatttaggaacaacaacaacaaaagataaaagatatgtagaaaacaaacagcaaaatgacagactttctttgttatcagtgattactttaaatataaatggattagattcaccacttgaagcaaaataacaaaatgaaatttttaaaagtaaaaaaaaaaaatagaatccatgatctatctacatggtgtttatggagaaccaatttagacccaaagacacaaataggttgagtaaatagtaacaaaagaactggtgtggctgtcgtgacatgatgcaatattgacgttaagtgaattatagttgtaagtgagaaaaaagggtattccttattgataaaatggtcaattaatcaagaagatataatagttatacacacgtatgcaccaagcaatagcacttcaaaatatgtgaaggaagacacatttaaaataaaagctagagagatctataatataaattggagacttcagtaccccactttaaaaaagaatagaacatatgaacaaaagattaatagaaaatgcagctattgaacactataatccagctagacctaacagatatatacaaaatactgcacaaaacaaaagcagaatacacatctactcaagagcacatggaacattctccagaatggacgctattttaggccttaaaacaattctcaacagttttttaaaacttgaagtcatacagggagtcatctaaaaccaccaggaaacgaagtttgggtaggggaggaacaatatttccttctactcaacttagatttattggccagcagtccctatcacacaagacagattaaaaaataaactcatgcacatttattaaatataatttttacttggcatgggagctttaataaggaaatgaaaactcagagaaatggctgaacctgaggactttacatttaggtatgatgaggagaatacaggtgtggagaaatatgactaagaatgaagtaaatgcagtaaatgggggaaagagcaaggcctgtgttcattcttctcagcacaccttcattttagaggaaacaatgctctcttttcctcttctttctaatcaacaactcaactttacagctcatggaacaagaaagagaaaagcaaacttaaaccaaagtccacagaaggaaagaaataagaatcattagaccagagattaaagaaatagatgagaaaaaaaactataaagaatataaatggcataaaaagttcctacttggataagaagaagaaaattaacaagctgttaggcaaaccaactaaaaccataagagagaagacacaaataacaaaaataagaaatttgggataatacaaccaacgttatgggaattaaaatgattataagagaacaccataagcaactgtatgtcaaatctagaagaaattgacaaattcatagaaaaatacaaattaccaatctaactgaagaagaaataaaaaatcagcataagaaatagattaagtcggcaattgacaatttctctaaaaagaaaagcccagagccagatgtcctcactggtaattctactagagatttaaggaggaagtaataccaatcatactcaatctcttccaaaaatagatgaggagggaacactgcctagcacattctagaggccagcattagcctcgtagcaaaaacaaacaaggatactataatacagaaaactattggctaatactcctgaagaataagcatctaaaattcctaaattaaataagagaaaaccaagtctaactacacattaaagagaacacatggaatgaaaaagcgagatttatcccagaattgcaaggatggttctacataagcaaatgaatcaacgtaataaacaatatcaatagagtgacaagaaaaagcatatgatctcagaagatgcagaaaaagcatttgacaaagttcatccactttcaagacaaaaacacttagcaaactaggaacagaaggaaacctgcacaaattgattaaagaagggcctttatcaaaatccacagtgaatctcacagtaaatggtgaaagagtgaaagcctccccacaaagatcagaagcaaaacaaggactcctgctttcacagctgctattcaacattgtccaagaagtcttaaatttcattaaaacaaaaaaggctagtgctacctcccaccacaagcatggatcagcgttaggaaattaaaataatggtaatagaaaaattataatgacagtgatgatggtgatggttttttaagtacacaactgaggtttagtggcagaaatccggtacttccaattacagtgcagctgtgcttattggggtgacggaatcaatctcgttttcagtatacatgggaagcaggagtacatgtagggtacaactgcatttctctggaactgtttttcacagaagagctacagtttatcctgcactctccattctgtgatcaaaaaccatgaaacagagaaaagcacttcaacctgagactcagtcacaagaactgcacctgccccaccttcccgcaactatatatgccacctctctgtgctgaaccatgaaggccagaggggttcacatgtggcacagacggaggctggactccctggtccgcaccctcccaggtgacgggtgctctgggatcacctggagaaggcaagtgcctgggctctgtcttttccaccagcagagggcagcagagctgcagccagaagagaggctggggctgcccaggaggagcctatgaaggaggccagcctttgtggggggtggtcaacaggtgttcaagggatcagtcctcactttggaagtttggtatagtccctcctgtcacctggggctgcagtgttcatattctgagggtcagacacacagcatcacccaggatactgacaggggcccaggcacagtgacggcctcagctgggaaacacaactggaggcacctgggccctggtgtcagcctgggcagctcccatagggctaggatttcctaagagacgctccgaggtcaaggtgctctaggagggggaacagtgtgaggggacagggctcccggggctcaagcccttcacccaggatggctgcctgagcctcctgccattctaagggtctcattcctccgtgtccagcagcatcctggggagctgagccctctacacttggcacttccagagacaccctaccaccccctccctctccctctccttccagctccaggccgactctgactcagaggcagctcctatgctcaggggattctcaggtgggtggcgtgggacatttgggatcctggtccctggatggggcattcccagcctccttgcggagatgctctccagagggaagggaatgttcacctgcctcaggccacagctctgaccatgggactatcctgggctcagtgacaagatctgtctggctggagggaccagggatcccccaccctccagagctcatgggtgttcagagaccacgacgctggaaccctcacagagaccaaataacctaaagttagtttctcagtcaggtctgggtttctggtgctttttacacatttatatgaaacactgatgagaaaaaataaagaatcaaagagcagaggatggcaatttctagtctattagagagatggggggtgtcatacaaggagcaactcaggtgagaaacgagactagactgtgtaatgaatccacatgagttgtggctgctcaaaggaccaaaccatggtaatggaaatcaagtttaggatataagtatcctaaagacacagaaccacattctaattaaactaccaggacaggaccaagtgagtctgggaaacccagagctgacttggaggaggaggaagatgatgggttcctggcccacctgctgctgagtcaggtgtcattgatgatctctcagcacggcccagctcagccccatggccaggctcctggaaggtccacagccctgctgagcctggcctaggacacagcacaggccaggatggtataaaacagtggtcatgtggccaaactccaggaggtgactgtgatcacaggccttcaaggatggagtctgatcttctgaccagagaagcagataaagtgagctgggacccacttcttcttcctcagtctgctgtgcttcccacagagctggtttgagtgacatccttcagtgaggagtcccagaggatgccgatttgcatcaaacactcactgcctcaaacggcctgagaggcaataagagagagctggtgagcccagctgtgctgtgggctcaggaggcagagctctgggtgtctcaccatggcctggatccctctcctgctccccctcctcactctctgcacaggtgctgcccccaagcccttccttcaggctcagaacccataggatcctgagctgggcctgcccaaacatgagttcatcccaggcacaacctcagggtgggaccccctgggaacagattcatcatttacaagcctcctctcctgtcctctcttgcaagctcctatgagcttacacagccaccctcagtgtcagtgtcaccaggacaggcagccatgatcacctgctcttgagataacctcaaagatgagtatgtttactggttctggcagaagccagaccaggcccatactggtgatatatgaaggcagcaagcggccctcaggaatttctgattttctgagtccagctcagggaacatggccaccctgaccatcagcagggctcagactgaggacgaggctgactattactgtcacaggtacaatagaaacagtgatgagcccacagtgacacaggcagattaggaagtgagacacaaaccccttcccaatctgtgtcaccctctttctccagccccaggatggctgtggacaaagccatgagcagggctggtccagttcacccagttctgtgacccccaggctgctcttccctccagccctccaggcaggttgtgaagagggtgagttaagaagagatttgaggctgtgtgacaggctatcctggggtttttctggccaaggataaagctggtgaaagagagcctgaatggacgggcagacagagtggcccatgcacgtagtggcaaaagacctgggtttccacatgccagcccttcaggcaggctctgcagagagtgggttaggaggagatttgaggctgtgtggacaggctgttttggggttttctaacccaggataaagctggtgaaagagggcctggatgaaaggacacacaaagcgtatctttcatctagtggtaaaggatgtgagttccatatggtgaagcctgggtcaccccttggcccagacgtcctaggttagtcctcagcatttccctagcacttaagttcctgaatctcctggcagccttatattcaaaacggtgtaagctggagtggacgctgtggggtccacctagactccacgttaaggtcgacccacacactctcagagcctacgagtggatacccatgctgtggggcacatgtcacctgacagagtggctgaccacccctgatctcttctttctgaccacttgggtgtttggcactatgtccatcatggacactctatgggctattaacctatgattcaaagtttcttctgtgtggtgcccgtgcccaaagaccacccacaggcttctgcccatactccacttcccccatttccaagtttttctcttgcagtccctggaacacctgcccaggtcatttcccactgccctaagcccctatctgccctggcatccggccactcacctttcctcacaaaatgaatgaccaggcgccatgccctcatgcaggaaagatgtcccctctccattgtctcttaatgccaccccttagtacacccatatagtgcagctgtgctctacttcatggtgatccagttcattgctgggctactctggaaatttttgctccatcagctgagcagagggactgctacccacacaacgtaagtgtaaacccagggagcagtgctagagcaagagagatgcaaacttggctgtggaccacccacaggttactcagctctggggccctgctcctgctccatcctagctgtgtcacatctgtctcaccagggatcgctgctggggtctgcctgagcacacgacgggggaatctggcagttctggctgcttggtcactgaatgtccgatgctgtcctgtatctaccagggaacaagagcacatggggagagttgttttccaaatgaatataattctctcttgtggatgacatggaattgttccaaatcccatgggattggaatcccattgggaaaatctcatgggattttcccatgagagattgcgtaaacatgagttttcagttcctatcataaattcttccattcctatcaccaattctgtgactatggtagagtctgctggattctgtggtcccaacagcaggacactcatacccctgcctgaacctggtgcagaacctccctgctctgggctccaaaacagtgggcgatgttcatggctcctgatatatgagttggagccacatccccaagggttaaatatgctgcctctagacaccagaatgaccttaaagctttgtgtttctttctggtgggaattgtaagatctaataacgtgctctttattttgtgagagatactaagctgctccagagaactcaatcctaaacatttcagctactacacaggatgaatggtcttagggcttgtttcgcactctcaggaatgcgtgggtctcaccaaagcttccaatagacagggccccctcatgcacatctgatccaaatacagaatagagccctaggaggttctcctgggtgttcagatggtcaaagcccctatgacaatatcatgaaaaagaagggagagttaatgaagttgaaaaaataaaagtataaacctatactgctgtctactccttgtatgcacaccgtttctgatcctgttctgagaggaatagaatgagtttctgcattgatggtgcctgctgtgcacctgtagccatgcatggtggtgtgttctatcagggtcttcatctggcacagcaatggcagatggaactaccagctgactgcgtctgtagaaatccacttccatcttccaggatccattcaacaattgtaggaatcatttcagtaaaccaaacacaagagcctcaactataactacaagtcctccaggagaggagaacgctgtctcagagggtgcattcctactggaatttctcttctctttgggacaaaccagcccagaggaggcacaggggctgtgtgtcatctggtttcctagatgaggtgtctcctcctcactgtcctgagattttgaagaaactggggagattggtgcagacactccttggatccttacaggaaacttccttcagaccacacactcctcaatttgttcccaagctccaaagtttctaaagtcactgtctaaagggcccacagtgtttttgtggagtggtggaaaagctctggggatggaaagtggtggtggttgcaaagcattctgaatgtacttactgttgctgaatgcacacttacaaatgattgaaatggtttaaaaattgttcattttgccataataaaaatactgcacactctggaggaaagtaaacctagtttaattttgaaattgttcaatggataccaatcaaagaatagtgtagcaagcaccatttcccctctcgctatagcagcaactgatccccttgtgctcttttggactctctcccctgctctctctctctcaataataagcaatgctcttctctccagtccaagctcacacttccccagttgtgcaggaatgcctattgtaactgttaatttatttccaggcagagtcctcaagattcctctgctcatattctgttctcagctgtctggagccagcatgacaagtgagccaagatcacttgtcatgagagacttgtggaaggttttgcaaaaagttccccaagaaaaaacaatgctcattgttgacagcaggtccatttccacacagtagggccatgctgggtgtgcagtggggctgtgcacactgtgcccacaggccaggctctgcactgctgactctgatcctgtgcttggtaggaccttgtgcactgctgagtccactgcagactcgaccctgaatgggaaggtggttcctagctgctgggcactgagtctcatagagggacagatggtattgaggatgcccggcccctgatgtacataaggggacaaggtctgctggtagaacaggaagatgaaggaacctgtggctctaaaggtggggtctccagccctcagtctcagctgcccatggcctcatctgtgtgcaccttgtcaatccagaccatgtgaattagaggtgaagggaattgaaggactttcccattttctcccattttctctcttggttacagaacgcacccttccacatatactgtattagagcctgtgctctacaaacatacctgacactaaattagtgacttttgaaagtgcagataggtacagcaaccagtccctctggagacatttcccataacatgaaccagtgaacccatctctgaaagccctcatgttttaaaagacaagatttttgaatttcaaggaaaactaaacctttgaaaaaaacatgattcaaaagagaaccttgccactttccattcctgcttgggctgcagtgaggacagatgcagcaagtgcttctgatgtctgtgtctgttcccctgtgtggacgcacatatccaggcgagtttcagtgaggtaggagacttcggcagcattggccgggctctggtttgcttctggtgctaacggaacatggaagagaggacaaggtagcgtgtcctgaagatcacatatttcctttttgcaggaagtgcctgggctcctggagtgttctcagggctttgatccaggccaccggctccgcaatcaacatcactgatatttcagcaggtcattgacctaattccattttagtgctatctcaaatggaaacattattttcttgtaactattcatatagcaacatagcacttaaatatctaaataacacacacagaaacagtagtctcaaatgcaaagctgtcacctccccacaccacacactttctcacccgagcccctgagcccacccttccctcggccccccctctcctgtgctgttagaaatctctgtcttctaacagggacagtgacacaaaacagccccccctcccgcccagcactcacaccgcagagcccctagtccatctcctgagggaacgtttacgtttctattctgacagagagaagtcgccgtgaatggagtctttaccccaaacccaggagtttctgaggaacacatggggtcagccactgtctgtgtggggaggcttcacctcagggaggcgcccggctctgggctgagggggactcaacgtgcactaaaaggcaggactaaggcaagtcccgggtcacagtgtgagggacgcacgcgccctgaggaggggtccctggtgctaggcctgacccaattctaaccccaggcacctttcctcagctcctgtggccctgggacacctccctaccctgcttcccatgaggctggtcacagctcttgtgagcaccgcctcctccatgtcacactttttctgtcaacattttgaggagccagttggttttctcctcattccatgttcctgtcccacctgcctgctgggggtggatttatttcatgtatgaggtttcctcagcctgagccacagctgcctcaaggacaccaaccctgtgggacactcctctgggaaaagcaaacaagtgccaagaggagcatctgaagctctggtgtgggagatgtcctccaccctgggtcaggggagtctggaggggatgagaagggaccaggggcctgggattgagctgtgaagggaaccaaaaggcaggagggacagggcaggggctgtcagctatgactcaggggaggttcctgggcctcaggatcctccctctgaggccaccagggggcgggggtggcacatgcctggacctgggaggtccctgctgggcttcaccctgggtgggtcctaggagctccttcctcctaagtccccctaaagagacagaggcattctggggtcctaaatctgtcatgcccccataaatgcatttctacgagggccaataaatgaactccaggtttatccaagcagcagcttcaggcgtctgcagacacagagcggggaggaattagccaacctgaggcaccctagaagggctgaagggggctgaaggggactgaagggtccctgtggggcctgtggtcctggggaggggagagctggggtgtctcccagccactctgggccctgtcctgacacttctcccacaaagaagggaagggaaatcctgggaccccacagccaggaccaaccgtgaaccacaggacaggaaggacagggacccccaaggctggctccatttcccaggcactgtcatgggctgagtctcaggaaatccaagtcaaggagtttcaatccccctggctgagccccactgtccaaggaaacagaagtctacgggcccaggcccaggtgagggtggggtaagaagaggagcttaggatgcagatttgcatggaggccccgccctcctctgaggcatcagggtaagacaaggctgggggcaggcccagtgctggggtctcaggaggcagcgctctggggacgtctccaccatggcctgggctctgctcctcctcacctcctcactcagggcacaggtgacgcctccagggaaggggcctcggggacccttgggctgatccttggtctcctgctcctcaggctcacctgggcccagcactgactcactagagtgtgtttctccctctttccaggctcttgggcccagtctgccctgattcagcctccctccgtgtccgggtctcctggacagtcagtcaccatctcctgcactggaaccagcagtgatgttgggagttatgactatgtctcctggtaccaacagcacccaggcacagtccccaaacccatgatctacaatgtcaatactcagccctcaggggtccctgatcgtttctctggctccaagtctggcaatacggcctccatgaccatctctggactccaggctgaggacgaggctgattattagtgctgctcatatacaagcagtgccacttaaccacagtggtccaagttcttggggaactgagacgaaaacctgccctgggctctcaggctccctttttgctctgaagatgtttcctcacccagtgcaacgggcttcctgaagcacagccttgagaattcttctccctcagcaactctcttttcccaccatgaaatccaaaggaaacctgctctgtggtttctcatccaggacagggacagcttccttttgcttgtgtgttgtggtccctgagtgggtgcaactcttcctagctttttaaattatgggagggtgacaatgagctccctgactggtgcagtccctgctgttttcaggaacatcctcatcctaaatgcatctgaatctcccactgtgtgcagaccaatctggacagatgttattagggggagtttccagaagccacatcttactcaactctgtatccaccacactctggtgaagatgcttttttggtgcccatcctcttgggtaaagtccactctctactcatgacagccatgtgtcccatcttctgaacttgggaaattgccacaccaaaccctcaggctcagggcccacataggagctcagaaagacgcactgggaaatggagaagagatctgcatccacccctcagtggagagacacctaactagataataagataaggaagtaggtttgcatgatgagtctccccttcttatgataagagagacctagagacccccttctcaggtgtgcgctcagaggcagaactctgaagcatctccaccatggcctggacccctttcctgctcaccctgctcactctctgcacaggtgctgcttcccagggctcaacccccacagcaccagggaacagcctggccctgactttcagctcatcacggcagtgatgcagggtatggcactctgagaatgagaccctcatcttcagactcacctctcctgtcctcgcttgcaggttttgtggccttctctaagctgactcagctgcctgaagtgtctgtggctttgggacagatggccaggatcacctgccatggagaggacttagaaagctattatgcacactggtaccaacacaagtcagtccaaacccctaatctcattgtatacaatgatagaaagctgtgctcagagatcactgagcgattctctggttcctgctcagggggaacagccacactgaccattactggggctcacgttgaagacgaggctatttttgtttttctggagataaaaacacattcatagtgacacagacagatagggaagtgaggcacaaaccccatcaccatctgtatcactctctttcttaagccccaggagtattgtggacaaagtcgtgagcagggttagcccagctcagctggatgtgtgaccccgaggcacctttcactctagtcatccaggaaggctctacagagggtgggtcaggagaaaatttggggctgaaaactaagctgtcctggtgttgtttagctaggtatgaattggcttaagatgacctgactggtaggacagtcacagcaagataaccattgagtaatcatgttgcctggatttccttttgtttaatgaccaaacctaaggtagctctctggtccaaaatgccctggattagtcccctggactcctcattctttaactgagacctttgatcccagctgtcatggcatcatgatgtcgtgaacagggaagtccattgtaatggcaactgtgacatcaggggtcatttacccactatctacccaaggccgcagggaatccttggcttctcacagctttttctcaccggaaaatgccattgagtgcagagtactgtgtcttccaaggatgtgccccctccataatgtggtttgggagcaatgattgcctgatgcctagattccaaagccatgctttaattcaggatgaccttgaagtgcctcctgctgagtgctcaattgtaacacattcccagaagagcctcccacacttattttctgggactatatacccgaaccctactgcatggaattcaacctctcagagtaactttccaagaaacccaaaaattaaaaactaaacaacaacaagaaaacaatatagagagaagagtatcaaagaaaagcaagttgtacaaagagagaactctggagtcttcaaatattaataagcatcaagcagcacatgtgtggacggaaactccattttcagacaaacagcagtccaaagacactcgcgggaacactccacagagcattctttctctctctctctctctctctctctcacacacacacacacacacacacacacacacacacaaacacaaaatatgaatcctgcttgttcctacagtcacagaggaaaggcctgagttaaggagcatgaggtcgaatcctcggaacagctttgcctcagtcctggagaaaatgtcagcctagacaataggctggtctggtctcaactaagtaagttaaaaagcaagttttaaaaagtaccaagtttccgagtaattatactaaatccaagaataaaagaccaaatagacagagaagtgcaagtatattctaaatccaacaaggaaaaactcaaaatgtctagcacctatcagatttccttgcaagaaccaagaaaatacatgctataaaaagcagaaaagttcatcagtccaaagtctccctgaaattgcacagatgatagactttgtaggaagaatacaaaagcgatacttataactatcttccacttgctcaagagggtacgggattgattgaacatgttaagtggagacacggtagacataaaaagatcaaagttgaacttacagaaattacctctaaaatgtccgcgataaaaataaatacataaataaataagggccaggcatggtggctaatgcctgtaatctcagcattttgggaaatcatggtagaaggattatttgagcccaggagtttgagaacagcctgggtgacacagggagaccctgtctctacaaaaaaataacaaaatcagatagatgcatggtgcacacccatggtcctagctacttaggaagtggtggaagaattgcttgagctctgtaggtcaggatggcagtgacctgtgatcatgccgctgaactttggcttgggtgatagaatgacaccgtctcaaaaaaaaaatgtctgagaataattgtagattagctcccgcaaaataatagattactgaacctgaagatataacaatgaagctcttcaaaatgaaacaccaaaaaagagaagataaaaaattacactgagcatcaatgagttttacgacatcttcaaggagccttaattgtataattaaatgaactaaaggagacaagattggtggagggagagggagggtacaaaaaccacttaaagaaataaggaaaaacgtgcaaaatttggtgaaaactataaacttatgatttcacatagtttaacacaacccagacacccacacacaaacacaaacacacagacatcatatacacaaaaaaacacacacataaagaaaacatcaacacccgccataatcaaattgcaaaaaaaaaaaaaacaaaaacaaaaacaaaaaaaaactgtgatggagaaatgctcttaaaagcagccagagagaaaagacatgtttgatgcaggtgaacaccataatgatgagagtagctttcccattagaaacaatacaagcaagaaggcagtggaggtacattcataaaactttttaaaacttactacgcacagcattgtacatattcagtgtaatccctatcaaaacaccgatgtcattcttcacagaaatagaaaaaaaaaatcaatcttgaaatttatatggaattacaaaagacactgaatagccaaagcaatagtgagcaaaaagaataaagctgcaggtgtcacaccacttgttttcaaaatatgctacaaggatatagtaacccaaattatactatactgttttatagtataaaacagacacagaccagtgtaacagaataggaaacacagaaataatccacatatttacagacaactggtttttgtcaaaggcaccaataacatacattggttaaaagacagccttcttggtgctgctgagaaaactggacattcacaggcacaagaattaaaatagacctcgatctctcaccacatacaaaagtgaattcaaactggattaaagacttaaatgtaaaacttgacactactaaactactagaagaaaacacagggaaaatagggaaaatgcttccggacttatgtgtagacaaagattttatacctaagctttcaaaagcacaggcgacaaaaacaaacatagaccaatggagctacattaaactaaaagtttctgctcagcaaagaaaacaataagcaaagtaaagagacaacttgtagaacaggagaaaatatttacaaactgttcatctggcaatggattcacatacagaataagacaataagacaagaaagcaaaacaattcaacagcaaaaaaaaaaaatgccaaataataccattaaaaagaggtcaaagaatttgaatagacatccctcaaaagaaacatacaaatggccaaagggtgtattttttaaaatgctcaacatcactaatcatcagggcaatgcgaatcaaaatcacagtgagacatcatctcaccccagctagagtgactaatatcaaaaagacaaaacataacacattctggcaagaacgcagtgtaaaggaactcttatacactgttatatactgttggtgagaaggtaaattttaaattaatacggccattatgaaaaacatgatagtgtttcagaaacactaaaaatagactatcatcatacaatgcaataatcccactactgggtatttaatcacaggaaaaaacgtcagtatatctaaggaattcctgcactcccacgtttactgcagcactattcataatagcaaagctatagaatcaacctgttttcatcaacagatgaatgcataaggaaaatgtggcatgcatacacgatgaaatactttccagtcataaacaaaagaatgaaatcttatcctctgcagcaacatgatggaactggaggtcattatgttaagtgaaattagccaagcacagaaaaacaaatgtcacatgttctctctcatgtgggagctaaaaaaagctgatctcatggaggtatagtgtagattaatagttaccagagaggctgggaagggttaggggttgtggggatgaggggtagttggtcaatgggcacaaacatacggttacataaaagcaataaggtctattgttgtatatcacacagcagagtgaacatagttaacataatttattgtacatttcaaaatacatagaagatttgaaatattcccaacatatagaaatgacaaatgctcaaggtgatggatatcctaaacactaattcgatccttacatactgtattcatgcatcaaaatagcacgtataccccataaacatatacaattataatgtatcagtaaaacatgttctttaaattaaaaaaaactgtcaattctgaattctttactcagtgaaaatatctttcagaagggaaggcaaaataaaatggttttaaccataaatatacttgcactattcatgacctgcagacacacactatagaaaataataaagaacacttctcagatagaaaatcatactaaagatgtgactctgaataaagaaaacaaaaacatcaaatatagtaactacataaaaacatatagaaatggtaaataaacatagatataaacgacttaaattacattacaaaacaactagacttaatagacaactatagaacagtccatccaacacagcagaatacataataatctcaagtgcatatggaacactctccagggtagaacctgcaaaaaaaaaatgagtaccttaaaaaaatagaaaatctataaagtatattctttgtgttacttcactcttgtattgctataaagaagtacctgagcttgggtaatccataaagaaaagaggtttaattggctcatggttatgcaggctctacaggaaatctggtgccagtatctgctgctggtgagggactcaagaagcttacaattatggtggaatgtgaatgaggagcaggcatgtcacatggtgagagtaggagagagagaggtggaaagtgccacactcttttaaacaaccagtctcacatgaactgggagcaacaactcattgtcatgagggcagcaccaatttattcacgaaggatccacgtggccccatgacccaaacacctcccactaggcccacctcaacactggcagctacatttcaacataagatttggatgggacaaatattaaaagtatataattccacccctggcccaccaaatctcatgcctttctcacattgcaaaatgcaataatcccttctcaataatcccccaaagttctaagtcgttccagcatcaagtttaacatcctaagtctcatctgagactaacctcctgtcacctatgagcctgtagaatctaaacaagttatttacacctaagatgcaatggtggtacaggccttgggtaaacattaccattccaaaagggagaaaacaaccaaaagaacaggccccacacaagtcctaaacccaatggtgcagtaattaaatttcaaacttccacagatctctagggcatgaaaagaattcagccaagctttttactaaggcatcacaagggtgaactttgctccagttcccaataactatctcattccatctgagacctcagcagcctggacttcactgtccgtatctctatcagcatcttggtcacaaccagctgaccagtccccaggaagctccaaactttccctcatctgtctgtcttcttctgagccctctaagctcttcaaacctgtactttttacccagttccaaagctgctttcacatttgcattatccttacatcaacaatctacttttggtaccaattttctgtgttctttcattcttgcatttttatagcacctttatagcaccgctataaagatgtacctgaggctgggtaatgtataaggaaaagaggtttaattggatcactgttctgcaggctgtataggaagtatggtgccagcatctgcttctggtcaggcccttaggaagcttacaaaaatggtggaaggtaaagtgaaaccaggcatgtcacatggcaagagaaacaaaaagaagaaagagagaaaggaaaggaaaggaagagagggaaggagggaagaaagaaagaaggaaagaagcaaaaaaggaaaggaaagaaacaaaacaaaaggaagaggaaggaaggaagagagagagagaggaagaaagaaagagagagagagagaagagatgagacgagacggggggggagagaggcagggaaggagagagggagggaggaggaaggagggagagagagagagtgaaagaagaaagagagaaagaaagaaagagagaaagaaaaaaagaaagaaagagaaagagagagaagagtggggaagtgccacactcttttaaacaaccagatcttgtttaaactagtggttagaattcattcgttattatgaggacagcagcaagccaatcatgaagggtcagccctcatgacccaaacacctcctactaggcccacctcctacagtggagttcatcttccagcatgagatatggaaggaataaacaatgatatcatcctctgaacactgatattgaaaaataaaaggtattatatgagaacactgtgaaaagctgcataccaaaaattagatgaaaagaaaaaatccctaaaaacataaaaactactaaactggctcaaggaggtatagaaagtctgattaacactataacaagagtttaaattagtcattgaaacctcccacaaagaacggcccaggcatgaagggtttcattgatgaatattatgaactgtttaaggaattaataataattattcataaacccttccaaaaatataagaaaggggaacatgagcagctcattctatgaggccagaagtatgctgatacaaaaacaaaagacatgaaaagtgaactggagcacaacagcctctatgaaaacagatgcaaaacaaccacacttcaacaaaatactagcaaaatataaaaaggattaaacaccataactaactagtattcatccccaatattcaagggattcttaacctatggaaattaattattttaatgctccctattaaagaataaaaccacatggttatttcaacagtcacatcaaatgttttcatgtacgcagacaggacttcctgttgttttcccattcctgttaaagcatcataaaaggcacgatttgtggtgctactggatggggtgctacttcatgcaaactggatatgtcatgtccaaccatgaatatacttagccataaatgctaaaagattgtaatttggtgtcagagacttggtggtcagtgaccacttccttggcaagtggtaagtacagacatctgaaaggataactaggatttaggtaggtattggataaggaggtgagttacacacagaaaaagtttcacttaaaaactcatagacgcttgaacacagaagatggctcaataggtctgagaaataaacaaagtccagaataactggagctgaatggaaacaaggcaaatgacatgaaccatctgtttctctctcgacaactcactggggcattgtctcctccctataccacccacgtggattgtaaaaacatctgttcttaaaactttcttgtgcatcatgacagcatgtagcacctgaatccagctcagttaaatgagggcaggacagtcaaccacaaaacccaggtggcccaggaagcacatcagggagacaagaccttgctgtcaaaagcagaggaagtgagattttccattgtggctaagcccagagcatatgaaatttcaatgggtacacaaaaaccatatagggtttggttaagctgcagatgcagtctttgcaggtttgaatggggccccagattctccatggcaaatagcctccagttgaggttgattgatgctggtcctccaaggaacacactttgggtggcttagctcctatgcaccctcctcactcatgcacagctgaaactcacctacataacgcaccttctgagaagcataagtgacctatttctcctccactaatgtgtctcagtcccttttactaaaaaggaatatctgaagttgggtaatttgtaaagaagcaaaggtttatttgggtcatgcttctgatgtctgtaaagttcaacagtgggcatctgcatccagtgaagacctcaaactgcttccactcctgacagaaggtgaagatgagccggtgtgtgcagaaatcaattggaaacagaaagcaagttctttcctaaaaatactgcaggagtttaatgatcatatttacaaagtgtttaacacagagcctgacacaccctagctgctcatgagttggcagcaattattgctgatgtcattcatgaaaattggacctcagatggagaaactgcagtgcagagagtttgagaagtttagggacaagaaagacttagtgacttaaaatcgagttctaggaactgaggagagcatccctgggcattttactgccatcttttccaatgtctcagaaactgtttcaatgtgacgtcaaccagagaggaaagcagaggggtttgcagaaccaggggctacaacttcatccacgggagagtgatgtagtaagcgggtgggaaggggcagctgagctcatctgaagggtgtttaaggttttctggcccagggatctttggccatctctccctgcccagggcctcattcttccactgaccggcaggagctggagagtggcttctgagtctggttagagatcccagcagcacccagagggggaagacattggagagacgggtctaaggtcactggagacactgtttgctgcctagagggctgcgacaggctccttgaaaacaaaattcagacactttaggggaagaaaacacaggatgggaaggctcctcaccaggggattgtggataacagagaccaaagcatctacaaggagcccagccctactggaggtgccctgaacacagagatcctaggggtgtctgtattattttgccagggctgccatagcaaagtagcacagccctatggctcaaagaacacaaatgtattttctcactattctgcagatgatgttagaatctaagatgaaggtatctacagggttggctccttctgagcactggagaatctgttccatgcctctcccagcttctgctggctgcggaggtgtttgctgttccctgccatggagggaaatcaccccaatctctgcctcacattcaaatggagtattcctcatgtgcgtgtctgtgtcacagtttcccctttttataaggacatgagtcgtgttggattgggtacgtactctgctgcagtatgaccttttcttaactaatttcaactgtaatcaccctatttaaatataaaatcccactctgaggtccttgcagtgaggacttcattatacaaatttgaggggactgaaattcaaattcctaacagtgtgtctgccatgactcaggcctctccttggggctctgcaggtgggatgtgcaccaccaacctctcaggtggggcattacctgacagcccagaaggaccccaggccctctgaaaaatgacgtctctttcatccaccttgagggacatgttttctggctgtccttctcatcctttgcatgctgacatgggagacatcatcctctgctttttaaagaaggactccttcaccttcccaatcaccccaagtagatgcccatgctggttccacagaatcaaaccacggtgggttacgagttatattagccaccagctgacaatattccctgaatgtccaggatccacccatgctctctgaccatcaccagagtgagcaaatctctgatatgtgggtaagagtttctcccatgggctcccagccgggctgtaagtgaggcaagaccccttcttcagtgcacggggctcagtgcagctgcctccctgaccaagtcttcctgggacactaagcttatcagtttctctcccccagggacagtttttggttgtcctaagcctagctcagctctgctatgaactttgcatcctaagagcccattaaacacccccttgtgcctcaatggaataacctggagtaaatagtgtgaggtgcccctgctttctgctcccagggcctcttctcctcggtggcaccagcactgccctattgaccagcaatcctcacctgcccattcaggcctctacactgcctaccgtgaacagtcacagatcacaaactgattgccaaatttgtgcagatcatcttgacagtttctgtggaactgggtgccttctcatagaaccaggaagtcacaagccaggccagctctagagaagcaactgggggagtaacatgcatcacagcgcctggacacaacaaagggattttgctgtagtcctactaggacacatcctagtgatgtctctgagaaccagtcttggtccctgcaacagaaagcctactaaacaggacagtaggctgcaaggttgggcacaatttgtgccgtgtgtgagccatgtagattgtgcatgtgtgtatgtgtgtacatatgtgtacatgtgcatttagtgttgcaaggaagggttgtgtcaaatgtcccaactcaaaacttttctgttttcctaagttatctgcttctatctttactacctttgtactatcataagaataaggataatgattagggttgaaataggagaaggaataatgtttaattattcattcttatgtgtttaatacatatcaagcactcttcaaaacaattcatatttattaaatcactcaatacgaactactccatgagccaaatattgtcattatctctccatttccagttggagaatctgtgatacagattttgacacatgggaaagctaaggcaaagaaaggaaaaggactttgcccgatgtcagaactagaaagtgcctgacccaggagcagaacctgagtcttccagtcccagagaccctgttctttaacaacagcctgtgggcctgtcactgtgctttaaggtaaagcactgacatctccctaagactccagaaagttctctgtactttttgaatcaagtaactcatacttgcagtgatttccaatgcagtaggaattctctggtgctgaggagtctactaggaatataatttcaatgcctttaaaatttttcagtagccacattttaaaagtaataaagaacgggtggaagcaactttcgtactatattttctttaactgagcttacccaaatattatttcaatatgtaatcaacataaaaatattgagatattttatgttattttcctacaacctttttgaaatccggtgtgttttacccccacatcacatcttaacttgaactacccacattttaaggactcagaagctccctgggactcatggttgctatactggacagagcagatccacatgaatgatgatccatttggatcacagcccctgcagtacttacttagaaccatcttggggcaatggagagtcctatgacccagagggcctccttagggaagaatggctgttccattttccaaccaaagtagaaatatggcgggctctcagaaaccagggaatttttacaatgtgtttcacacttcttcccttctcaaagacattgactataacttccagttcgaagataaatctgagccatcaaaggcatttttttctattggtcagtggaatgaatggcaatggtccctgtggattgtgctccaaggatccctttctgtgggaagattcttacaataaaaccaactaaaagtaggaagttattgtttatatgtagatctagatgaaagggggctgatcatgaggaatatagtattgaaggtgagtgtgttgctattcttcacaaagggctatttttgcctaactcacaagcatcaatcatttttatgaaggtgtattttcccagagtggtcttagcaagttacatccaacgctgtatcaggacccacaagcaagggtgtcagaactgacctgcctgagcggtcagcaggaaccaatgtggagactctgaggtctccacaccaccaaccatgtccaacctccagtcaagtgacaggaggagtggaagcattggttgggaagggcttggaggagctgcagtgacatgctcagccaagtacaggagcaggcatattggtgtcatgtgacctcatcttatctcagttatctcttttcaccaaactccaaggtgcaatgtgtggaggcatctgtctgtacccatggacaccttgggcttcacacattatttctatttctaatgaaccagtgttttgttaatgaattcatttcatcacatccttagtacttctaggttggaaaagcaatacatgtctctaagatattaggtaggaaatattctcccgccactcgtatttattaaagttaaaatgcttcagtatctaatgtgacagttgtccaaattcaatacccttcaccttgttagaaatggaatcctgatcctaacttgtctggagaggaggctggcatgaggagcatgaccacacatctggatgtccccagtgtcactgctaacacacgctcttttgttacttgccgtgaagggagcagagggagcatccacacctttgtccaaaggacttggaggacagtgcacctgattaaaaaatgcagggctgtgataagtgggttccgggtcctggatgagggaagagaagatgaggaggcatggggtaggaggcagggcagggaggagctgtaaggtcaggctctgagtatgggtgaaatcctgactccactcactactctctgggaggatttgataaatcttgtaacctcctgatgttggttctcccatcaataaactaaaggagaggtcgtgtcttaagcgtatgcttgctgtggggctactgtgaatgtgtggttgaggtggtgcctgcaaaacactctccaaagggcctggcacgtattaatgtctcaaaggagtcattctgcttaagctcgtggaggatgactttcctcctgtgtgcactagagggccttgttttgaggaccccagtgacttccctggtagggctcaagcacaaagggcatgactgatgcttcctctgaggccccttctattgggtaaaattcatgctccactcatgacacccacctggcccttcttctgaccttgagaaattgccaatatgaagccctcagactcagagctcagacagtacctcagacagacatgctgtaaagtggagagcagatttgcattcaaagctcctcccttcttgagcttcaagaagaggataagacaggagctcatagtgtccaggttccactgggcagtctcgaatagagctcttggaagtccctccaaccatggcctgggtctccttctacctactgcccttcattttctccacaggtcagaacatcccagggaattcagggaaatgttttcactgctattttcccatgagcaccagtcctcaggggcattctttccagttcttctgtgcattcagcatcattcatgacattctgtttacaggtctctgtgctctgcctgtgctgactcagcccccgtctgcatctgccttgctgggagcctcgatcaagctcacctgcaccctaagcagtgagcacagcacctacaccatcgaatggtatcaacagagaccagggaggtccccccagtatataatgaaggttaagagtgatggcagccacagcaagggggacgggatccccgatcgcttcatgggctccagttctggggctgaccgctacctcaccttctccaacctccagtctgacgatgaggctgagtatcactgtggagagagccacacgattgatggccaagtcggttgagccacagtgacacagatgaaggggaagtgaggccaaaacctcccacctcccctttctcctcagggactcagagtcaacagccctgggttcctctccagtaccctgagacctctgactctcctccctccaagacacccctaggcagaagcagatgcaggccatgactgaggccattttgaaaactcatctttctgtttcctccacaacagcctgtggggaccatgctgggagagaccagagcagcccaggcaggaaaaggaccttgagagagtggctaggatgagatgaccgtgtcccagtgtctcattgtgccctgtgctctattaccaggctctgccccaggaaaggacatggatcttgacctgtcagccatcatttatgagagttcaatttttacattttttaaaatataaaaactacaatctccaagatgctaggagcaatttcactgagtctcatcatggaattctgacctcccccagcatgtcccctgttcctacaatctcctgttcaagaccaactcaactccattacccagaccagctgctggatgatcaagacagggctgtgagagcctaagaatctttaaggtccacgatgagaacacgtcaagaaggatttatgttggaacttccttccccatggatattcacatcaacagagaagatatctgagttcttgcctacacctatgaatacctaagacatgaagtgtgtgtgtgcatatggtgtgggcagcacttcctcactcaacaccagagagtgtctgaggacactgggtacagacatggagacagggcatatttttatacactcaattaagccctcgtccttctctgctcaccaaggagccacccaacaaggccacagcaggaagagaagttgatttccatgaagagccttccctttctaagagtcctggaaacccactgtctagttgtggaatcagaggcagagctctggggcatctccaccatggcctggaccctcccctgctcaccctcccgactctctgcataggtgcttcctcccagggaataagccccatggaaccaggggtcagcctggccctgaccttgagctcagtgcagggagtgatgcagggtgtggggctatgggaatgagaccctaattctcagtctcacgtctcctgtctcctcttgcaggctgtgtggcctcctctgagctgactcagctgcctgcagtgtctgtggctttgggacgtacggccaggatcatctgccagggagatagcataggtgactctgatacaaactcgtaccagcagaagccaggtcaggtccctgtgctggtaatttatggtgacagcaaccagccctcagtgattcctgagcaattttctgactgcatatcagaggacatggccaccttgattattaatggggcacaggatggaaacaaggctattactgtcgctcggaacagcactgcttctcatctcacagtgacacagcatacagtgaagtgagatgcaaaccccttcccatctatgtcattctctcccttcaaccccaagaggactgtggtcacagccatcagcaggtctggcccagttcattcagatttgagacccccaggctgcccttccctccagtcctccaggcaggttcattagatggtaaatcaggggtggatacacaactattaaatatcatcatgttccaatttttcatgaagtagaggaatgattgaacatgttaagtagaagcacagaataaccaaaaaaggactaattgagcttgtgtacagctaataattgcaatgtctgtcaactttaaaaacatactggatgtgattaacaacagattagattatgtaaaacaaaagattagcaaacttgatcatgtagcactagaaaatattcaaaatgcagcacataaagaaaaaacaatgacaaaaatgaaaaagcattatcggatattcataaagaaaatgaaggtgagttataggacaacttcaaacagcctgaggttgactaggagtaatggttcacgcctataatcccagcactttgggaggtctaggagggaggatcttttaagactaggaattcaagaccagactaggcaacatagctctataatttaaaaaaaaaaaaaaaacttaaaaattaactgggcttcgtggcttgcacctgtagtcgtacctacttataaacctgaggcagtaagattggtagagcccagaaattcaagactgcagtgagtgagctatgatcatgccactggactgcagcctgggcaacagagcaagttcctgtctctaatatagggtctcaatctgtcattcaggctggagtgcagtggtgcaatcatggatcactgcagcactgacttcccaggcccaagtgatcctcccagctcagcctcccaagtagctgcgaatactggcgtgcaccaccatgcccagctaatttttgttttttctggagagactgggtctccttatgttacctaggcttgtctcgaactcctggactcaagcaatcctccagcctcagcctcccaaagtgttgagattacaggggtgagccgctgcacctggcctaaaaaaaaattttttttaatacaacaacctaagtatgtataattgacatccatggaatgtaaaaggtatgggtgggtagaaaagaatatttgaataaataatagtcaaatgtgctccacatttggtaaaaaccaaaaactggtatatccaagaagttcaacaaaactgaagcacaggaatcatgaagcaaatgactccaaatgacataatagtcaaattagtaaaatctggtgatgaagagccacttaaaagtatgattctaagagtacatttctcattagaagcaatgtaagcaagaagacagtggagcaataattttaaaatactgaaagaaaacagctgtcaaccttaaattctttatccaacaataataactttcaaaagtggaggataaatataatgttttcagacatataaaaacttacagaattgattactatcactcttgtcattagaaatgacaaaagacacccctagacagggggaaaatcataccaaattgaaatatgaattcacacaaatatcagataatgcaactccatttgaatatataatcacatttgaagacagattttaataagtgatatatgtatcacaaagcctaaagtaaacattaaacttttttataaaagaattatgactagtaagctgtattaggattctccacagaaacaacataaatcagatatgcatgtatgttatacgtgtgtgtatatatatacatatgtgtatagtatatatatgtgtgtatatatatacatgtgtatagtatacatatgtgtgtatatatacatgtgtatagtatacatatgtgtgtatatatacatatgtgtatagtatatatatgtgtgtatatatacatatgtgtatagtatatatatgtgtgtatatatacatatgtgtatagtatatatatgtgtgtatatatacatatgtgtatagtatatatatgtgtgtatatggtgagagaaaaagaacaagagagaaactaattttgaggaattggatcatatatttgtggtagctgacaaggatgaaatatgttggtcaggctgaaggctggaaattcaagtaagagttgatgttgcagtcctgcatccaaatttagcaaggcagcacttcaggaaacctccacatttgttctaaaaacattcagctcactaaagagtcccacccacattgtgaagagaaatctgcttatacaaagtttactaattaaaatgttcatcacatctgaaagttatcttcatgtcaactcctatactggtatttgataaaatcaatctggtgcatagcctacccaatctaacacttaaaattaactatcacttaacccagcaaggaaataaaaagataatttaaaaaatcaatcaaaaaaggagacagcaaaagggaaagaaaactaacgaacatatgggacaaatataaaataaagagcaagaagatccttccagctcagcctactgagtttctgggactacaggaaggtttgtagttctccttgaagaggtccttcacatcccttgtaagttagattcctaggtattttattctctttgaagcagttgtgaatgagagttcactcatgatttggctctttgtctgtctgttgttggtgtataagaatgcttgtgatttttgtacattgatgttgtatcctgagattttgctgaagttgcttatcagcttaaggagattttgggctgagacaatggggttttctagatatacaatcatgttgtctgcaaacagggacaatttgacttcctctttttctaactgaataccctttatttctttctcctgcctgattgccctggccagaacttccaacactatattgaataggagtggtgagagagggcatccctgtcttgtgtcagttttcaaagggaatgcttccagtttttgcccattcagtatgatattggctgtgggtttgtcgtagatagctcttattattttgagatacgtcccatcaatacctaatttattgagagtttttagcatgaagtgttgttgaattttgtcaaaggccttttctgcatctattgcgataatcatgtggtttttgtctttggttctgtttatatgctggccacttctcaaaagaagacatttatgcagccaaaaaacacatgaaaaaatgctcaccatcactggccatcagagaaatgcaaatcaaagccacaatgagataccatctcacaccagttagaatggcgatcattaaaaagtcaggaaacaacaggtgctggacaggatgtggagaaataggaacacttttacactgttggtgggactgtaaactagttcaaccattgtggaagtcagtgtggcgattcctcagggatctagaactaaaaataccatttgacccagccatcccattactgggtatatacccaaacgactataaatcatgctgctgtaaagacacatgcacatgtatgtttattgtggcattattcacaatagcaaagacttggaaccaacccaaatgtccaacaatgatagactggattaagaaaatgtggcacatatacaccatggaatactatgcagccataaaaaatgatgagttcatgtcctttgtagggacatggatgaaattggaaatcatcattctcagtaaactatcgcaagaacaaaaaaccaaacaccgcatattctcactcataggtgggaattgaacaatgagaacacatggacacaggaaggggaacatcacactctggggactgttgtggggtggggggaggggcgagggatagcattgggagatatatctaatgctagatgacgagttagtgggtgcagcgcaccagcatggcacatgtatacatatgtaactaacctgcacattgtgcacatgtaccctaaaacttaaagtataataataataaattaaaaaaaaaaaagaaaagaaaatgtctctagacagcttggttcctgagctgggaatcaaccgtcttttctctccctttcaacccagagtgtggcaggcgcgccccctacaggcagctaaaagagctgactgagatgccgtctccatagggagggatttgggctgagaatttgggctgaggattttcccatgccctccctggcaggctggtcccaggacactcagaagacttactgttacaggtccagagcatttctcgtcttccttttctctctccttgccaagtgaccttggaattgttcctccccatctcagccccttcccttttgtgttaagtgcagtttgcagattttgtgttcctaggtcctgtatctgtagaattttagggaaagcagtgctggtcacccacatggaattcaagacagcgagcccaggaccagaaacacagacagcagtgggggtccccacagagcagcatggtgggcaccaggtggaggtaagaaaccaggaaccactcccctgagtgtcttcagccccaggtgaactagggaggggtcagtgggctgggctcaacccaccggggactctcctgtcactgccccagcagcaccatcctggaagcccctatatgtgctaagcagctgccaaagaacttgattaattacctgtaaatttcccttcaccacacctgaccacacatgactcctgcccccaaattactaatttattaaaatggcacaattagccgaaatggcctgaatccaggacccctttcaggtttgccgctgacctctcaggtcctcacacatgccagactctttccacaggggcctgactccactgtttccaacacaaatcccaggactcatttttctctgtcagtcctgacagcagttccagagacacttccccattaagatgtccccaggctcttataatacaacctgtctgttattttctgcctaaatctttttaattatccccatagcatttacaactgtaggaatctttgcctattgttaattttattaattgattggtgttaaatatttacttaattggtcatggatgcttttttaccacagaatcacacataaaaaacagacacaaacagctaagggtgtatttctcgctgcaataatacccaccactttcacgaagacaccagggtctttctcactttttgtcccaccatccctatgatattggctttattttcatccctgctgatgtgtgacctcagggtggctgctgcagctccagctatcactcccatattcaaggagaaaagggcctcatgaatctagtgctctttcacaagagcaaagctttcctaagaagaatttcacccactgatctcacaccccactgatcaggcctgagtcacatggtcaatcccagctgagcaggacctgggaatcacaggcaccagtcttttcggtgaatatagaagacagtgctcaggtggaaggtgacagggactgtctgctgggtctgcaaacccagttttcccgcacagccaaaccagcacgatgaacaactcacttcaagaaggctgtgtcttgttcctgctgaattcaccgcatggaacgtgtcccagaccacagtgggtctggattaacatttgatgggtggatgttcttctgtctctgactttggtgcaggagtcaccactgtacgctggtcctgcatccacagcggggaccagtaagagccagtccctgagtcctgtgatccccgccctgcatgccaagccctggtattacccccatgaccacccaccgcccagacacatgtgcaggcagcctcagatggaccttcctcctcctcttccaaatattcatgttcatattgtcatgagtaatctgcacccctcgcacctggtattgaggcaggcatgagtcacaaagagaagagaaaaatttcctccattggcaccagcagtctgcagaccagggaatcagggacctgaacagaagattttaattatacacccggacccaggaggcccttgagcctccagcagccagtatggagcagccaccaggggacagaacagagtcacctggcaaagtcacttggagatagggtagacctgggtgacaaggagatgctgacatgcagggagggtcagtgaccacaacctgagatctagaaaggtgtcgtttttctacagcatcatccttaacatcgagtacaaattctccaggctttgtgtttctcagctttgtctctggccaatgttgcatatttgacacaggtgcagacactttgcttccccctacacactggcccactcttctgtgctaaaacgctgtcattgccacaaacgccatcctcccctgtgggcacatgtgtttcatcaccctcctgtttgctctgagagccccctcattctgctacacagcaaagttttctttcagcatctaagctgtacctgaccatgaccacatactgggggtacataggcacagcacctgtgccctaccctaggagctcacagccaaggccaggaacttacagcatctcctgagtctttcaacactccgtgtgcacatgacaagggtgaagtttgattgtggaaagcaccactcagaagcaatggcaggtccctgcatgtgtgccagccttacggtgtcacctgtagagtggggtcatgagggtcactgcactgggttgaaaagtgccctccagagggggagctagaaccacacctaacttctggattttgccacaaaatatttagggacaggacacccctggagtcctcaattacccaagttattctgagccagtattcaacagaggaagtaccttagatctcagaataatccctcagtcgccattgtaagtcagtccctggccatctccacgcaggacaaggaatggccacatgggcaggacatcatactacctggaaaacgcacaaagaattcctctcagagttctgcatggccagatcagctcaggagtgaggccataacacaacctacagtgacgatgtcaacccagatgatgggaccagaaggagaatgagaattctgtgtgctgagggtgggtctttaggggccccctctctctctgtcccttggggctgagcccttctctggaaaccacacagctcctcctgcagcagcccctgactgctgatttgcatcacgggccgctctttccagcaaggggataagagaggcctggaagaacctgcccagcctgggcctcaggaagcagcatcggaggtgcctcagccatggcatggatccctctcttcctcggcgtccttgcttactgcacaggtgctgcccctagggtcctagccactggtccagtcccagggctctgggtccagcctggccctgactctgagctcagcagggcccccgcctgtggtgggcaggatgctcatgaccctgctgcaggtggatgggctcggcggggctgaaatccccccacacagtgctcatgtgctcacactgccttagggctctttcatccctggatctgtgtccaggccaggcacgtgggaagatttacttggagttcagctcctcagtttcaagccttttctctcccgttttctctcctgtaggatccgtggcctcctatgagctgactcagccaccctcagtgtccgtgtccccaggacagacagccagcatcacctgctctggagataaattgggggataaatatgcttgctggtatcagcagaagccaggccagtcccctgtgctggtcatctatcaagatagcaagcggccctcagggatccctgagcgattctctggctccaactctgggaacacagccactctgaccatcagcgggacccaggctatggatgaggctgactattactgtcaggcgtgggacagcagcactgcacacagtgacacaggcagatgcggaagtgagacagaaaccagccacctcggcctggctcacaagacccttccctctctcctgccctgtcacactgagcaggagggagccttccatgtggaatggaagtttccagtcctatccctgcccttatgttcctgagagacgggagcaagttcctgcccacctctaggctcagcttatcccagaataaactgagctagtcattttgatgatcaaatgccagctcccaaaagaccccagaaaccctgatatctaagtagcaccgactctattagtatcaagggagactagccctagggtggaatcattttagtgtctcagaaggcacagggcaatggaaagtgtttatgaggtttcaggatatgcacgtgagcagttaaaggcaggtcttacaaggaaggaacctactagaattggggcccatctgtgacatcatagcacagcctggtggacacagagaagggaaggtcctgaatcaagtcttgatcagtaaatatttattggataagtgagcaatttacataggtgagaactgtgtgctctcttgagcagaacacttacctggataattggttttcaggaattccctgaagcaatgagtgacattctttattgttttcaccctcatccacctgggaaagagtatcctggaaccagcagttaacattgacacagctggtctcggtcctcagcacaaacattcattgcaggctgaaaagtgacaacggaagagaaaggagtttattaaatccctagacacaaacaaatccataagcagagatgagagatgcgggctcagctggcccagtcccacaggggtcattcctcttgtgatggaaatgaccacatgagggtcccccaagcggtgttggggggcagtcatggggaactggcctcccagggctacctgctgcttgggctgggcagaggttagagggatggaagtctggtccagtccttcccagcagcatctccaggctcctcctccctctactggggcttcccctccactccccagaaccatcattgcttcctcatctcctgtctcctccctgccccaaggccctccctgtgctcaccctggctcctccccctgctccatgcccagcctctgcagagcagcccaggcccagagacttgggcagaagcttccgtcccaccagctgcagaaccttccctacagaaccaggccagtccctgtgtctcatatttgtagagatcccaatcaccctcagagatgacgggtgggaaaccagcccacagtgacctaggctgttgggcatatggccttcaagctggccttcaagcccacttggctgcatctccttggccaactccaacatccaggctgggagtctggaatcctagttcccctggcccattcactcccactagggttgcttctaaactccctgggcctcagcttcctagtctgcccactggaagcagcgacaggcattttccagggctgcggtaagggccctggaacaccctctctcaccctctctctccctttctctctctctctctctctctctctctctccccctccccctccccctccctctccctctctctctctgcctctgtttcctcctcagtagtgggaagaccccctgtcaggtgggccagtccatgacatctacagagggagcaggaacctctcctatttcctggaggagagctggggtggaggctgcaacccaggatcatcagaggagctggggtcttcaaggttcctagggaccccttaagcgggggtcagagtggcttcagcggtcttattgctcggtccagacagaagatgtttccagttgtgaaaaacgacttcagggacaacaaaaacagagattcgcctctccagacaccagtggttggtgtgcctggagtactcctcgtaccaggcaggggagagagtcctagacagaggaggttctaagtgtcacctagatttcaggcctcggggcctgtattgggtaggtgatgtcacagtgagttgatgctctgtagccccttccctaggaggtggcagagggaagagctggtggtcctctgaggtgtgagtgagtccaaccctgagggtcttcccaagctggaggtccctgggtgtagacggaagaggttctggtcaaagaggcctggtgttgaatcctggtccatttattcatttggtcaagaaatattcatggaggacccaatatgtgccaggtgccaagccaggtgactggggacacagtgttgagtgggacagttggctccttcactgctagaggtattatattctcaagccgagactcggctctacgattgtatgtcagatatatagcctctatgtgcatgtctccagagactggtttcctggagttccaagtgacagccatcactcacctcgaatgcaaaaattaaaggagcatccaaaaacctagtgacccagataaataatacttaatgcaatattttcaaaaatcaaaattaatgcccaacaaacccacaatgaacaaaatttcaggatctgactcactcacctcagtggttttgttcttggtcctacccacagtcccacaggtgagtgagtacccacagggatgcaaaaccagagtcaggcccctgcaccgccttctgcccggccaccagagccctcccctgggtcttggcctttctcttctgaagagctccagccagttcctcctcaggcttcctctactgctggtctcttctgccccctactggattctccccttacagctgcactccaggcagctggtggaggttaaagaacagaaacctcccaaaactccaccctccagttccaggctggctccacctcatgtccaaaaaggctggtcctccaggtctttgattgctattagtaagtcccaagacacagtctttacaccaagtcgctgtgtgccttgggcaagaaactctccctctctgagactgtgtttccacactggtagaagtagctagaagacctccctgccaggttggcaagtccactctgtgacatctacaaagggagcagggatctcttccatttcctggaggagagctggggtggaggctgcaacccaggatcaccagaggagctggggtctttggggttcctgaggactcctcagagggggatcaggagctgcagagccagcttctaactctggggactcagagatccagaacctttgtcatatccccagccaatactttgtcatcctgtgcctcagactcccccagatcccaagagtgagaagctcaagacgagacaagaaagaccagccagcttgaatttagggatggtggggagtggggagctggggacccctggacctgggggagaggagtctgcagtgcctgcaggtggagtttctgggacctgggggatggagactgggcaggggactgaccagcagaaggccaaggtgggggataccctcagacatggagcagggcagaagcaactggatggggtacatccctctgctttgggagagaagggccagggcgggacccagagagctctgcagaggcaccacagaccctcagcagggggtctgccaaacaggacagctggacttggctgcttctgcccaggcctggatccagcccttgcacatctcagggcaggggataggcctgggtggccagagctgcagctgcacctgctggggaggcctagtccagtcctccagggtccccagacagactcggatttccgactgcagccaccatggaaggatgtggtctgcggtgacgatgtctatccagaggccatggcaggtgcaagggtgggggtaggggcagcagctggggatgctacatttagggacagcccctttttatccccaagacctgggactgtccctgaaaggaaccacagcttctgggtcctgagcagtgggtgagtgtcatacccacagaggggctggaagggagcagcttcagcctagactcccagggcagaccctgccccagccccgaatatccaaggagcccaagatcagaggcaggaataggccaagctccccagtggagaagctgtgctggaccaggggtttcccagggccctcccttgtgccctgaatgatgtctgttagggcacctacaccctgttactgctcagtgccttgcctattttgaaggacagggatgtgtggtgattatttgtataatccagcccccagcacctggtcctcaaaagttacccaagcaatgtgtataaagatccagcctggagatctttgaaaaccgattcgatgagtcgaaccattaagtcatgatcaccatcctcaacttcatctctttcttcctcctcctcctcattatcatcaccttcaagaactgttaagagtctgagacttcatcctatttgcagactaaaaagtaagcctgccacagtgccatggatgctggcagaagatacaagactcctgggtcagagacaacgaataatctgtttttcacagcaatagcagttgccaaggtatcagcattgtcttgcaccagttccacaaggtgatgcaaagagggccaggtgacatctgcatgccagagctcagggatcccaaatatttcatacttgacagtaagcatatatctgtgttttgctccaaagagaggcattctctgtaccttccgaggttgttcactccacaaacactcttgaaaagataatccacaatcagtgcctttgcccgagagacatgcagaaatgcagagatccatagtagaccactgtctcccaacaaccatcaactttatcaatgaaatgaagtctcaggctatttgtctgttaccatagcccacaaaaatgtctggcttgattgtcaccaaatgtatcaaggaagttaaggagtatctgacacaaaatgtgaaccaagcaattctcaaaggagcctcccaggaaattcactttaggaagtcctaggaggctcctctgagagttgctaaaacaaaacattgagagtcctagagggctgcagatctgaacttgagcagatatttttaaagattttgtggcagaaaaagaaactggaaagcaagagggcagaccctcattgcagttctgtaatgtaagggggcagagcaggggcctttctcaccagagtatggggtcctgaagatctcctcaaacatttttatactaggctctcagggcaacagaaaagatgggagcgatgaatggggcgtaaaggagtgcaaatgacacaaggggtcacatgaagcaaaagaggtttattcaaccagatttagtccatgtttaattgagccactcctttgtgccaagctctgggttttcccatgcaccaagcagtgtgttaccacctagacccagagagccatgtcatcatcagcaaagcacgccctagtgtcatgcaaggaccaggcctcagattccgactccagacctactgcctcttggccctgtgacattaaaagagtagggaatcagcctgagcagcatttcctcatcttcaaatgtggaggacagtagatgatcttagctcccaggattagtgcttgtaaagcaataataatgtaatgcattattattgtattatgcatcatattcccatattatagtcaaaaaggaccccaacttaaagcacctgccagccctctcctcctccaccactgccgaatggagccaggcacgagtattccaggtggacagacgaatagaaatacaggggacgagccccttcctagatcctagcgcagcttgctccctacttaaggaatgatattggaccctgcattcatcttctctggatggtaattttctcacctgtaaaacagagacactggccccaaggacaccccacaagtagttgtgaatcccaaagtaagagaagaacaaaaaaagaaccagaatttattcaacacccactgagtgcttagcaaacacatggtttctttaactctcataagcttcatgctgcagaggaactctccccattttacagataaggaaactgaggcccagaggtaacctaggtctagatagactccacatttatgacttcaccactcttccttgcctgaaggatatagaatcactccctgcagggctcttgcctgactcaggaaagggccacaggatagccagccaggcttaaccaacccagccaagaaagggctggtcccaactggctggagtgcagtgtacaggcacccagcctggaagactgatcagaaaagaagccacagctccagccccagccccaaccccctgagctcaagcccttggggactcctgctgggcagctctctaggccctagggagatgctccacagacccaggctgccctttgggaagtggggaagacaagtgggtcaggtgtgcaccacccaggggcggggccaggcagccggctgtggtgggaggcagttgagccctggattgtgaccgcttcagggcagttggtagatgcccctctgggagagatccccaggggtgacagccatggaccctggaagggcctgggctagggacagggaccagagccagtccagggagaggacagagccaatggactggggtgtactgtaacagccctgctggcgagagggaccagggcaccgtcctccagggagcccatgctgcaagtcgggccagaggtgcccctgaacctgaaggccaatgagacccaagacaggccaagtgggttgtgagacccctgaggagctgggccctggtcccaggcagcgctggcccctgctgctgctgggtctggccatggtcgcccatggcctgctgcgcccaatggttgcaccgcaaagcggggacccagaccctggagcctcagttggaagcagccgatccagcctgcggagcctgtggggcaggtaaggggcaagagattccaggggatgtgggggtcctgcagcagagctgggaaagggtgaccaaggggagacaagccagaggagtgaggaggaaggttaacccctaagaggggcctgggctgacactggctttagtaatgggttgatattttgtccatcacagatttgtttgaattactgtttttaatatcatattacgatattatttttcttgatttctgagttttctggcgccacttaaattttcaccagggtcagtgcctcaatcacctagtcctagtcctctgggtagggaaggaacagaggcagggacaggacatccacagggggtggtggccactgtccccacagggtgcccaggcctgttcctccccctcctcctctctgcccatgtgcctcctgcccagtgagggcaggggccactccctggagaaggcagcaagggcttggtttggtctcccccaaggctgtctgttcaccaacttgcacataaatgcttactggggccaggctcaaggacacagggagggtgggatgaaccgaggggagctgtccagtcattggaacaggcccacggcccatgtttggagcaataaagggagaggggatctccctctgggatgatgcccaggctggtctcacagatcgaggggcactggctggtgatgggtgcccccaaaagacagagcagcgtcagaggagaggagagcacaggatgaggctgggagctcctgggtgactgggaaggggaggcaagaagaccatagggtccgtgcaccattcccagtccaggacgagtccttggatggatttaggtagattgattatcagagtcagatttgtgtttttggaaaaatcagcaccggattggaggctgatgcgacgcccgattagaggagggaggagagggggtgatggccaagtccagggtaggtggggatcctggaggaagccgtgccttggggatggggaggacactcagattcagagcacccaggggcccagtttcctatgaaatgggagcatgaagttgaagtgagggctgagcagaggggagcagacacgctcggggactgtctatgggcattaaaaatgtataaccattttagcaacaggcggcgagtcaaaaaacaaagtgtgtttatctaaactgggcaattccacttctaggaatttatcctaagggttggttgggggaataatcaaagctgtaaccaaatctttataacaagggtggttagctcagcattattagtgatgggagaaaactggaaaaaatccaaatatctaccagaaagggtgtgaaaaaacacaattgtatttgggggactgttgttgtttttgttttgaaacagtcttgatctgttgctcaggctggagtacagtggcgtggccacagctcactgcagcctcaacctccagggctcaaaagatcctccagcctcagcctcctgagtagctaggactacagatgcaggccactacacctggctaattttgattaggattattattagtttagagacagagcctcgctatattgctcaggcctgtctcaaattcctaagctcaagcaatctttctgcctcagtttcccacgtgctggaattacaggcgtgagccactgcacctgacccaactgtgtttttaaagtatatatgcattttcaaaaacctgtcagaaaatatagaaaaatgtcaatggtgtgtctggctggctgatgggatttcacctaattttaatgtggctttataattttctggttttgtgaagttgttcacaaaaagagacatttcttctaatataatttttaatacaacagtaatgtactcatgtgcattactctttttgtaatgagtatattacaaaatgtaatgacttttgtacattactcttttttcttgccaaaaaaaaaaaagattaagcagagaagtatataaagtaaaagcaagtgcttctgcttaccatctctcacctcttcccagagatagccactgtcaggttggtcaatatacttccagaacttttcctgtgtgtgtgtgtgtccctgaaaacacacacacacacacacacacacacacacacagttggtgctgggattttattttgcaaaagtaagagccatattctgcatattaccaacttttaatctattattgacactttctgtatcagtccatatggattaaccacattcattgcttataaactttgttttataagcaaagtttagatgagccagaatttatttccactaaaaaatctaaatgacaaatgatgctgcagtggaaatttgtgtgtgtgtgtgtgtgtgtgtgtgtgtgtgtgtgtgtgtgtgtgtatgtgtacaaagtgcacttatatatctccccaggatagatgcctaaaagtggaattgctggatcagagagaatgtacttttgaaatcttataggtagtgtttccaaaagtctgtgtccactcactccggtgaatggtagtgccttcgctcctacattcttaccaataatgcaaaattgttgatctttttatattctgcccatctgatgagcaaaaaattgaatgtgtttatggttttattgtgtattttattactggtgaaattattttttatatttttatttattggttttatttcgtctgtgaattaactggtcatcatgttgcccgcctttccattcagttgctttcatctttttatatatcaataacatattgggatatatttgggattttaaccacttgtttagtgtatgtattgtaaatatttttccctggtctgttttacgggtcttttgtttatggggtctcccaccataaaactgtggtaaatttttatgtgtcgaactggtttaatcttttctttatggtttctgtgacctccaccatgtgtaggaagttgtctttatttcaatattataaactcatttttctgttttattctggtacttttggtgtattggtgttttatttttttttctttacttcccctggagtttatttttgtggatgtaggaataagaccttattttccaaataggaaagccaatcatcacacatttgttgaatataaatgcaacttttctcaattactacattactgatttattacattctttctgtggttctcttggtttattgagctattcctgcgcccaccctgttttgattattttagctttatggtatgttcggtaactggtagggaaagaacccgtcattgttactttttctcaaaatagtcatgtctattatctgtcattcttagagttggactgcagaattggttctctaattttcaaaaatcattcttgtgttatgtggtaatatcacagaatatgggattaatttgagaactgctatctttataatgctcagtgtttttgttcagagacatgatgtactctccattcactcagataagtggtttaatattttattcatgcaaatcttgcacactttgttttttattcataaagggtttgtaaatataattttattgaagttataaattttttcacaattttatatcgtaaatgattactgtttctatagcaaggaaccctattaacttttctatgttgctcttgtatccagacactttaactcttgtattaattccagcagttcttcagctgattctccgtgtgtgtgtgtgtgtttgtgtgtttagttaactatcacaccatttgccaagaacaattttctctctttttctgtaatatttatacctccttctctcccccttttatgtcatttcattggctggaatctatacaatatgctgaataataaaagtgagactagacaaccttgccttgtttctgattctttaaatgttttgcctttaaatatgaaggttgctgtaaatttggggagatattcttcactgagttaagaaaattttcttcagtaacttaataaaaggctaaatgtttgctttctttatatgagaaacaagtgttgaatttatattactattatattaaattctgtttcaaaaatcttctgcacatgtcttaaatacaaatgtattaaatacaagctgctgctaagatgaaagttgctggccccatcacaatgggtatcttccaatgtgaataaattgccttggggaataaaatcagatttggaaaaacctgaggatggttgccatcataaactcttagagtgtgacctgggtgtttttctttttctctgtaggatgttaatagtatcttgtgtcatgctaggatgtctaggacagagggcaatacaatgaggggaaggcattctgcgatgtccccaggcctctggcttgaagagtaacttgctgaagtgaggactctgtggaggagcaagttatacagaaagaagtttagttgtgatctgttgagttggaggtgtctacagggcatccaagcagacataggttgaggaggcagaatatatgtgaatctggagccaagaagagaggtaagggctggaaatagggatctaagacccctggacagttgtgagtgtgcacaatgagggtcagatgcagagaaaattaggagactacagagagcagaacccagggtggggatctgggagtcagcagttgggcatgggcctggtagaaagggaagccaaggaggaggagagggggcagtctcagacaccaaggaggggagagtgactagaaagaaaaccttcttgcagagacataggggatggggaagaactgcagactgaactggggcaaaggactgttggccttaaccagagagatttgagggagagatgaggctgagagccaggggatcctgccatgtcccagcataaaaacagtacctgacacagatgggtgcttgggagctgttgtcggatgaatgagtggacagatgcatggatggacggatggatggaaggatgatagattgatggacaaacagatgaacagatgaatagctggatggacaactggatggatgggtagacagaatgatctcagagatcagaaaaagcttcatgcactaagtgggactgaaccgcgtctccatgggtagaaagcagaggaatctccacttgagtcaggaatgacccagtgctctcaatccagggagaaagccagcctggcttcactggggacacttgtgtgggggactcagaggccctttaaatgaggccagacgaggttggacaggtccaagccaactcagcactcctctgccacactgcacaggaggggatgtgtcactcagggagttgctgggacctatgggtcccagtgttgtcatcagcaccgacagcctcagagaggaaagacacacactggggtaactccaaggctgtgtgtggcacttgccttggacagcagacaggcacagggacacctctagggggctggccacccccctgcctcatgtctaggtcccagccccgcccactgcaaccctgtgcccgtcatgcccagcaggctcctgctccagcccagcccccagagagcagaccccaggtgctggccccgggggttttggtctgagcctcagtcactgtgttatgtcttcggaactgggaccaaggtcaccgtcctaggtaagtggctctcaacctttcccagcctgtctcaccctctgctgtccctggaaaatctgttttctctctctggggcttcctcccctctgtcctcccagccttaagcactgacccttacctttctccatggggcctggaggaggtgcattagtctccgggtaaccggcaggaagggcctccacagtgggagcagccggatgcagcctggtcccggggcctgagctgggattgggcagggtcagggctcctcctctcttccagggcagatgtctgagtgagggacagaggctggttctgatgaggggccctgcagtgtccttagggacattgcccagtgactcctggggtcaaggacagaggctgctggggtgggcctgggagctgctgagtctcatagtctaggggagcagccccaagaacagctgagggtctaggctgaggactggatgccaatccagcctgggagggccacacggcctggtgacacagaggtcaccccaaggggagaccaatggagggcacagagagggctctgggtctaggctgcagctctgtggcctgtgctgggtcatgaggacatggggacacagagggacgggtgagactgggtgaggtgccagaatccaaccctcccaggacagtcaccagaaaggagacagtctcttagggcagagatgtgtctgtccctggagccccgtcacctctggggcccagtgtctctctgttcacggatcggcctcctgccttcctcaaagggcatgttagactcaggaaatgaccagaggggagtgaatgaggggtgcagagaactccatggctaccaggtgaagtttggggtcatcacaggctgctggggtgggcctgggggctgctgagtctcatagtctgtgggagcagccccaggaacagctgaggtgaagggttctgtggtcgggcttgtggagacaggaaacatctcagagcctcagaggagccctgaggcttgtctaggtggagcccactccttgccaggagagccaagtgggctgggctggggcagagcccggtgcctgtgagggataggaagctccagttcaaagcaggcttgggtctccccacacactgcctgccaggacagtcctacaggatgagcaggggacccacagttcacggaggaggctctaggtcctggaagaataaagtgggtgatggaggggggtatagggatggaaatgagggatccaggggtcaaggccagattctaaactcagactccagagatcagagaagaaggaacacagcctgccctgggtatatggagaaattgaggctgtagaggagaggggctgggccaggacacctgtgaaaggtgacttgggagggctcctaggaaggcacagagctgtctgctctccacagggcatgagtggaaaggatggggaaagaagaggagagaaccccgggtggaccggatggccacactgtgaaccctcccagagactttagacagagagaggggctccacaacaccccggtattctgtctgccctctctcacccccttccctgtccacacaggtcagcccaaggccaaccccactgtcactctgttcccgccctcctctgaggagctccaagccaacaaggccacactagtgtgtctgatcagtgacttctacccgggagctgtgacagtggcctggaaggcagatggcagccccgtcaaggcgggagtggagaccaccaaaccctccaaacagagcaacaacaagtacgcggccagcagctacctgagcctgacgcccgagcagtggaagtcccacagaagctacagctgccaggtcacgcatgaagggagcaccgtggagaagacagtggcccctacagaatgttcataggttcccaactctaaccccacccacgggagcctggagctgcaggatcccaggggaggggtctctctccccatcccaagtcatccagcccttctccctgcactcatgaaaccccaataaatatcctcattgacaaccagaaatcttgttttatctcattttttttctcacataaattgctagcctccccggggttctcagtgtggggtacagggaattctgcacccagtgtgaaaatcacccaagggaggaggctcacagcctccctgagtcatctccccagagggtccttcctctcccagtcaccccttctccaactctccactgtacccctgagctaccagtctggcatcagttcagaccagtcccacaccctcctaaattttacttctcaataaatacctgatcatgtaaaacgcagcatttctaatgtgcagtctctgtctggtcatgtgtctgggctgaagggtcactgctcagggacagggggcagttccaggtgagatcccatgtctccgtcatcccacaccccacccaacctgccagggaaccgggtgagctccctgtgccagtgggaactgcaatccaaggcacaaaattgtcctgcagtccttgcccacctgggaagggacaggggcccagtgagaggtttgctggcgccctgtggggagattcaggagaaatgaagggggtccccggagaccagatgagggctagaggcagaaataatggaaaaaggacacccttgactcaaggccacggtctcagcaggaacagaaggtgaaattccccattgcatacgaggaaccagtcaggagagtgtttactgggtgagggataaataactgtgctgccactgggaacttgtaaaaacattgggaaaggaaacatgcaagtgtctttctaagacttgtacaatggacattggctaagtaaacatactgacaagtcctgcactagggaaccagtttaatatgatgagccacagcatatccaaaagcatgttgatctccttcttcacctttagaagacccaaaacactctgaaagataccagcgtttcctggaactagtttgtggaatatggggtgaggttgatgcacatgatgttacgggtatatgatcacatggctgtgggttggggatcaggctcaaagttaacactagcgtggggctggatgtcaagcatgaagggtgtggaccactaagtcaggcccaggtagagttaatttctgattggtttgtggctggagcttgatgatggtcagtctgcaggagcaggaggatgtggggaaattgggaaaatgagaaaagtcacaaatccaagctcaaactctgcatctattgattgcctgggggaggctaatcagagttgaattcaggatgagcttcagggctgggtcagactgaataagagctgagtgaatgtgggctgatggctccaggcaagtcctggcctccactaggagtcagatcccacaaaccctcctgcccgcagagcaccctctccctccgtagctcatggtggcgcagcctccccaccccatcccatgtacacctgctgcctcatctcagagacactcattccagtgtctctgacagcagatgatgtcagcctcctgggtgtggagaccccagctgtcttggagagtcctcagtgcctgggtactctcagaccccctgtctctgcctccagcacatcagagacatagcagctgcctccaccagagctgctgggtgatcccaacaggccagggacagagcctgcaaagacaggaatctctgcagtcacaatgaggcaaagaaagagccccttagagcttgatcacagccacccctgatccaaatcccagcctctcattagaaggaggcttgagggttctgttgccacagcacctgtctgagcccatttcatggaggggaaaactgagatgaccaagggccagatccatagtcctgctgggcacaaggccatccccagcagctgcctaatctttgactgtgttataagtttccattatggaaaactttgaacacatacataaggagacagagaaataataatgcccccaagttcccatcacccagcccccccaataagcaattcacagacattactgacccacccatagcagaataacccctccattacacaataccagacatcacatcttttcagctgtaaatatcccatttctatgctggaaagatatgggcttaaaagtaactgcaatattattaccaaacctaaatagaaattatcactaattccctaatatcaagaaataatcatgggctcctcaaatccctcacaaatgccagaagcgtattgacttagttaagtgttggtgctgtggttattttggggttttgggtggtttatttcagaattcaatatggcatcaaatggtgatgggcgcatgtgctgtcaggccagttgtcactggtgaatatttcctcaattgctctagtgctgcctggcaaggcaggagctgcaggagttgagagctgtccggggaccttcccacggttggaatacagccacacctcccaaaacaagaacccagggctatcatctacttctttttttttccccctgcaaaatggttctagcatggagggacttaactggattcagactagacattgcaaaatagcttccaaggacagggagctgctaacagcgagatcacccatgtcagattctcactcttgtagtaatgttagctgcataggatggtcaatagctacatccctcagaagggaaggaaggcagagggatgaggcttcagttcacctccttctcatgagtgctgcagagcatctgtgaattcagaggtctgcagctgggctctgttcacccaggagtgtgcttcatgctctaggaaggagccactttgcacacagatgatccggggcccagccatccttccagggtgaataattaatgtcttctctcatggtgaactctaggattcaagccatctaatgtttttgaagccactgtcattatatttaattgatgatgacaggtggccaccaatgatgaatattttcccagggggagtctccctaagtggctttagacttcctcacatggccccaggggattaaatggctcctgattactcagaggataagaggttctgtcttatcatgttcctttcttatttgtcttatgtgtctttcctgccccaggcctgggatcccccactgatctcccttcccttagtgagaggtggtatttggagaccacattctggaggctcccttatgtcccccatttgaaaaagacaacggcagccaccaccccagctgtcccacccaacatgaggccagattcggggtgcagggatgctcccaaggttaccctaacagatgtgactggcacttcatattgggaccagccaggcctcactgaccaggcctatccaactagaactactccagaaggtggggctgaaacccaccaaggttcccagaacactgcactctagggcaatcagcctctgcatgggaggagaggggcaccctctgcaccaccccatggtgttaccaaaagttgaaccatgggttggttcaactttgcagagaagagaccacctaacccatctgtggaaattcactccttagcgatactgatgctccctaagaaattcaatcctgggcctgagtgatggttggtgcaaaaaacaaattcaagatcccagtgtcctccagaagcctggatttccagggatcctgctgtgagtcacaggacgtcaccggtccccttctctttgtgggttgagtgtgggggccatgtggactccctcatgagcagatgccaccagggccactggccccagcttcctccttcacagctgcagtgggggctggggctggggcatcccagggagggtttttgtatgagcctgtgtcacagtgtgtggtattcggcggagggaccaagctgaccgtcctaggtgagtctcttctcccctctccttccccgctcttgggacaatttctgctgtttttgtttgtttctgtatcttgtctcaacttgtggtcagcctttctccctgcatcccaggcctgagcaaggacctctgccctccctgttcagacccttgcttgcctcagcaggtcactacaaccacttcacctctgaccacaggggcaggggactagatagaatgacctactgagcctcgtctgtctgtctgtctgtctgtctctctgtttgtctctctgtctctctgtttgtctctctgactgtctgacaggcgcaggctgggtctctaagccttgttctgttctggcctcctcagtctgggttcttgtcggaacagctttgtccttgggttacctgggttccatctcctggggaattgggaacaaggggtctgagggaggcacctcctgggagactttagaaggacccagtgccctcggggctgatgctcgggaatcacagagctgggacccagagccaggatccagacccagaatgaggtaggaggtggaggggctgccctgggcgtctgggggctgccagggactgagccctgagccagcctgagactcaggaaaccccgtcaggagggagaagggagaagcagactctggacaccagaaagccaggggaagggtcacaaaaggagtggatgtgacggaagggcgggctcctgggtctcttcagaacatatcccctgtgcccagggggatcagaggggcagagtccactgcgtgaaagccccactgctatgaccaggtagccgggacgtggggtggatgccagaaaagactccacggaataagagagagcccaggacagcaggcaggctctccgatccccccaggcccttgccccatacacgggctccagaacacacatttggctggaacagcctgagggaccaaaaggccccagtatcccacagagctgaggagccaggccagaaaagtaaccccagagttcgctgtgcaggggagacacagagctctctttatctgtcaggatggcaggaggggacagggtcagggcgctgagggtcagatgtcggtgttgggggccaaggccccgagagatctcaggacaggtggtcaggtgtctaaggtaaaacagctccccgtgcagatcagggcatagtggaaaacaccctgacccctctgcctggcatagaccttcagacacagagcccctgaacaagggcaccccaacacctcatcatatactgaggtcaggggctccccaggtggacaccaggactctgaccccctgcccctcatccaccccgcaggtcagcccaaggctgccccctcggtcactctgttcccgccctcctctgaggagcttcaagccaacaaggccacactggtgtgtctcataagtgacttctacccgggagccgtgacagtggcctggaaggcagatagcagccccgtcaaggcgggagtggagaccaccacaccctccaaacaaagcaacaacaagtacgcggccagcagctatctgagcctgacgcctgagcagtggaagtcccacagaagctacagctgccaggtcacgcatgaagggagcaccgtggagaagacagtggcccctacagaatgttcataggttctcaaccctcaccccccaccacgggagactagagctgcaggatcccaggggaggggtctctcctcccaccccaaggcatcaagcccttctccctgcactcaataaaccctcaataaatattctcattgtcaatcagaaatcttgttttatctcattttttcttttctcacatataattcctagcctttcctgggttctcaatttgtggtggaaagaaccctgaacccagtgggaaagttgcctatgtgaaggggttctcagttccctgggcatctctgcaggtaaggccttcctcacccagacaccccttcctcagctctccactgtacccctgagccaccagcctcgcctggctgggaccaggggggtgtcacactctcctagattctgcctttcaacagaaacctaaccacgcatcacacggcacttctcgcatgccttctgtgtctgctccagtctctgggctaaagagttgctggtccgggacaggggataggtccgctcttggtcagatgccaggtccctgccatggcatccctgaccctatgcaacaagccagtgactctggtgagctctctgtgtcaggagaatccatgatccagagtttcatattgtcctgcaagcatctggtgggctgtagctcttgccaaactgggaaataccatggcccagcatcaggatgcaggacagtccggagagggaaatcaggagaagtgaaggggtctctggggagcccagatgtgggctagaggcagaagtaagggtgaagagcacctatgagtcaatgtcatggtctcagcaggaacacagttgaaaatccccattccacacaagaccgtttagcaggaaaggagtccatacttgtgctgccaccaggatgtcctgagaagccttggagaatgaaacatacaggtgcatttcctagacttgacaatgcacgttagccaagtaaaggcaatgaaaagttctctactagggaaataatttcctgtggtaaagcttagcttatgtaaagtcacatttatccatctggcacctctaaaagccccataatattctgcaagatactagtatgtcatggaagtagtttatgaaacataaagtgagatttaagaacaaagatgttacgggtgtatgataagatggctacaggctcagggtcaggctcgaggagtgaaggaggccgtgtcaaattcatgacaagagttggagctgggccaggctgggtcagggctgtgtgaatgcagacagagggctacaggcaaggtcaggcatccatgaacactcagctcccccagaccctcctgcccactgggaccttcgccctcccttggtcacagtggtggagccttcctacccaaacctctatggaggccctggatgactgtgcgttcttagtgcccacgcaaacttagactccctgtctctgcctccagcacatcaggaatgtggcagctgagttcaccagagctgctgggtggtcccgacaggccagggacagagcccgcaaagacaggaagctctgcagtcacaatgaggcagagaaatggccccttggtgcttgatcacagccacccctgatccaaatcccagcctctgaattagaagaaggctaaaaggttctagtggccacagtccctgtctaagcccatttcacaaatgagaaaactaagaccacccaaggagggccagttacgtaggcctgctgggtacaaggccaaggtctacttcacacccagcagctgtccaaagactgagctgtgtcataagtttatattatgaagaactctgaacatataaataaggagacagaaaaataacagtgtcccatgttctcatcacccagcactcaaaataagcaattcacagatgatgccgacccacccacagcaaaataaattctcccttacacaacatttagaaagaaatacaagacatcagatctgttcagctgtaagtactccattactgtcctggaatgacatggaccttaaaataactataatatcactaccaaacctaaatagaaattatcactaattccctaatatcgagaaataagcagggtctcctcaaatgcatcagaaacaccagaagtgctttggcttagttacatgttggtgctgttggtatttgggggtttaagtttatatgaggagcaatatgacatcaaatggtgatgggtgcatgtgccatcaggctggttgtcactggtgaatatttcctcaattgctctagagcctcccggcaaggcaggagctgcaggagctgagagctgtctggagaacttcccctggctgctatacagccacgcctcctggagcaggaacctagggcttccctcagcttttattttcctggaaaatgattctagcatgaaggggattaacttgattcagattggacattgcaaaatagcttgcaaggacagggagctgctaccagcagagtcacccatgtcagactgccactcttgtagtaatgttagctgcataggatggtcaatagctacatccctcagaagggaaggaaggcagagggttgaggcttcagttcacctccttctcatgagtgctgcagagtgtctgtgatgtcagaggtctgcagctgggctctgttcacccaggagtgtgcttcatgctctaggaaggagccactttgcacacagaagatccggggcccagccatccttccagggtgaacaattcatgtcttctctcatggtgaactctaggattcaagccatctaatgcttttgaagccactgtcattatatttaattgatgatgacaggtggccaccaatgatgaatattttcccagggggagtctccccaagtggcttcagacttcctcacatggccccaggggattaaatggctcctgattactcagaggataagaggttctgtcttatcatgttcctttcttatttgtcttatgtgtctttcctgccccaggcctgggatcccccactgatctcccttcccttagtgagaggtgatatttggagaccacattctggaggctccctcatgtcccccatttgaaaaagacaacggcagcctccaccctagctgtcccacccaacatgaggccagattcaggggtgcagggatgctcccaaggttaccctaacagatgtgactggcacttcatattgggaccagccaggcctcactgaccaggcctatccaactagaactactccagaaggtggggctgaaacccaccaaggttcccagaacactgcactctagggcaatcagcctctgcatgggaggagaggagcaccctctgcaccaccccatggtgttaccaaaagttgaaccatgggttggttcaactttgcagagaagagaccacctatcccatctgtggaaattcactccttagcgacactaatgccctctaataaattcaatcctgggcctgagtgatggttggtgcaaaaaacaaattcaagatcccagtgtcctccagaagcctggatttccagggatcctgctgtgggtcacaggatgtcaccggtcccctctctctgtgggttaagtgtgggggccatgtggactccctcatgagcagatgccaccaggaccactggccccagcttcctccttcacagctgcagtgggggctggggctaggggcatcccagggagggtttttgtatgagcctgtgtcacagtgttgggtgttcggcggagggaccaagctgaccgtcctaggtgagtctcttctcccctctccttccccgctcttgggacaatttctgctgtttttgtttgtttctgtatcttgtctcaacttgtggtcagcctttctccctgcatcccaggcctgagcaaggacctctgccctccctgttcagacccttgcttgcctcagcaggtcactacaaccacttcacctctgaccgcaggggcaggggactagatagaatgacctactgagcctcgtctgtctgtctgtctgtctgtctctctctctctgtttgtctctctgtctgtctgacaggcgcaggctgggtctctaagccttgttctgttctggcctcctcagtctgggttcttgtcggaacagctttgcccttgggttacctgggttccatctcctggggaattgggaacaaggggtctgagggaggcacctcctgggagactttagaaggacccagtgccctcggggctgatgctcgggaatcacagagctgggacccagagccaggatccagacccagaatgaggtaggaggtggaggggctgccctgggcgtctgggggctgccagggactgagccctgagccagcctgagactcaggaaaccccgtcaggagggagaagggagaagcagactctggacaccagaaagccaggggaagggtcacaaaaggagtggatgtgacggaagggcgggctcctgggtctcttcagaacatatcccctgtgcccagggggatcagaggggcagagtccactgcgtgaaagccccactgctatgaccaggtagccgggacgtggggtggatgccagaaaagactccacggaataagagagagcccaggacagcaggcaggctctccgatccccccaggcccttgccccatacacgggctccagaacacacatttggctggaacagcctgagggaccaaaaggccccagcatcccacagagctgaggagccaggccagaaaagtaaccccagagttcgctgtgcaggggagacacagagctctctttatctgtcaggatggcaggaggggacagggtcagggcgctgagggtcagatgtcggtgttgggggccaaggccccgagagatctcaggacaggtggtcaggtgtctaaggtaaaacagctccccgtgcagatcaggacatagtggaaaacaccctgacccctctgcctggcatagaccttcagacacagagcccctgaacaagggcaccccaacacctcatcatatactgaggtcaggggctccccaggtggacaccaggactctgaccccctgcccctcatccaccccgcaggtcagcccaaggctgccccctcggtcactctgttcccgccctcctctgaggagcttcaagccaacaaggccacactggtgtgtctcataagtgacttctacccgggagccgtgacagtggcctggaaggcagatagcagccccgtcaaggcgggagtggagaccaccacaccctccaaacaaagcaacaacaagtacgcggccagcagctacctgagcctgacgcctgagcagtggaagtcccacagaagctacagctgccaggtcacgcatgaagggagcaccgtggagaagacagtggcccctacagaatgttcataggttctcaaccctcaccccccaccacgggagactagagctgcaggatcccaggggaggggtctctcctcccaccccaaggcatcaagcccttctccctgcactcaataaaccctcaataaatattctcattgtcaatcagaaatcttgttttatctcattttttcttttctcacatataattcctagccttccctgggttctcaatttatggtggagggaattctgcacccagtgggaaagtcacccaagggaggaggcttacagcctccccgagtcatctctctggaaggtccttcctcttccagtcaccccttccccaactctccaccatacccctgagcctccagcctggcctcagctcagaccagtcccacaccctcctcaattttacttctcaataaagacctgatcatgtaaaacccagtttccaatgtgtcgtctgtgtctggtcatgtgcctgtgctgaagggtcactgctctgggacaggaggcagtttcaggtgagatcccatgtccccgtcaccccacaccccacccaacctgccaggaaaccgggtgagctccctgtgccagggggaaccatgttccagagcagaaagttgtccctgcagagtggtccctgaaatgcagttcttgcccacctgggaaggatgtggagcctagtgaggacagagtggtggccctgagcagggcatcggggagaaacgaggagtgttccaggaccccctgctttgggctagagacagaaaacccttgagcccaggccaagatcagagcagaaacagggttgaacttccctgtcccatccatgatacccagttaggagaccatttactaggtgccatcaccttacgttacattacaacattacgtgattgtgccatcacccgggagacatgaaaaaggctggaaaatggaacccttcagtgtagtttacactttcacaatgtacgttagctatgaaagatgctgacaagtcctgcagttggaaaacagttcatgttacataaccttgcaagtcaagaattctattcagtgtcccaacccacttagccctagagcgctcttcaagacactggtgttcatgtcactagtgctgggacatgggctgaggctgaggcacacagatgattcgttgtgatcaaatgggtcaggctcagggttaacactggccaggtcagaaagagagcatagggctgagatctcaaccatgaagagtctcgaattctaaagtcaggggacgcagtagagttagattatggttatggctggagccatgatggccagcctgtgtgagggtaggactcaggtggactgggtcaaatgagaaaggcaccatcccaagcatagaatcggcatccattggttgtctgatggaggctgtgtcaaaatcatactcgcccaagaatcagggccaggtcacactaggtcagggcagggtaagtgtgacttaagggctacaggcaggtcaagttttcatgggactcagctaccttagacccctccccaccagggcctactccctccctcaatcatgtggttcagcccctccatgtgcacctacaccctgatgtcagagacacaatcatcccagggtccctgacagcgagtgaggtggccttgggagatgcacttcccagccctcctcatcagtcttgggcactgtcaggccccttcttggtgcctccagcacatcagcggtgtggcaggtgccttcaccagagctgctgggtggccaggccaggcctgagacagagcctgcaagggcagagaactctagggccatagtggggcagagaaggggttcctcttggagcctaatcatagaacccctgcctcaagtcacaacctacaagttagaaggaaacttaagggtcctgattcccaccaccctgtctggccccatttcatagatgtgaacgctgagacccctatagcaaagaggaccgctttgatctccaccttctcaatggccctgctgggtaggatcccctctggatgtcccctggtgctgtcccaagactaatctctctaattactgccttgtaagatattacggaaactgacagcaagaaaataaaaaaacaggaggataatacagctcatgttgacccacccacaatcaagtaacctcttttacacagttgtttgaagcaaattgtagacatcatgtccattagtctaaatattccatttgtgtctctaaaaatatggacccccccaaaaaaactacattcttacaaacctaaatataaatatctaattctttcatatcaaaaaaagaatgtttcccatcaaatacttcacaaatatcctatgcttctttcactagacctgtgtttgtgttgttattctgtggttttccatttcatttctatgaggattcaatatggtttgaaattgtgactggtgactgtgtttttagacctgttctgtctgcaggtatcttcctcattgatttttaatttccttgcaaggcaggagctacaggagctgggggttggtcccaggaccttcccatggtcaggatacagcctgtggcctccccaagctggaaacaagcgctcctctctgcttctgcgtttcctgaaaattggttcttggccagaaaggtttaacaaggctcagtgtgacttttcagcaagaccgcttggctactgggctcccatgtggggtcatctatttgtgacgttagctgggcttcacactttgtatccagtgccattagatggtatatggatgcaaggtgactgcatttcagttcgaccaccttttccttctactgactgtctgtaaaaggtgtgccctcatatgttctttgctcctctgggagtgtgattcttatttcagtaagaaatagcatagacatgttgagtctttcctttcatttagcatcttaataatgatgaccatgttgcctgccatctcgtgaagatgaacaattatttcatggtgagctcaaagttatgttactgtatgtgactcacttgagtccaccatggttctattttattgatgatgacaacgacccaccgtggcccactcagtgcctcttctggtggccccaggatcctcctgaaggaacccaggagacctcgatggctttccactctctgttcacaatctatcctgggcacatctttctcctgccttgtgcctggaattgcccattaaccccaagtggactagtccccataactgggaggtgggatttagtgaccacacttggggtgcttctcacacagcccttttgagtcagacactccagacatacccagaaatgagacaagaccctgaaagggtaacaggggcttgcttccaacttctccctggaggttgaggctggcatttcatactaaaacctagtgagacccatcccaaactaagacaacacaaggaggacggaagtgagacgccctggagttgtggttgtggtcacgttggagcttcccatgactgctgactctggggcaagctgcccctcctctaaggcactcactggggacacctgaggacgcctcctgctcttaccctgtagtcacaccaagagatcagggttacaacaaccctatagagaatccctgtccccttccatgtcacttcactccttcgtgaagcaaatgccctcaaggagctcattcccattcctgggtcacagtcacctggaaaacctgatccagacaccaacctcctcaggcctcgccatttccagacgtcccgttactgcatacgcttggtcgactgtcccatctcagcttgagaagggcaggcaggtgtgtggactctgctgagcaaatgccttccaggggcagtggtctggcttcctgcaccatagcttcaggtgggggatggggagggggagttaggggccccagggaagagtttttgtatgaacctgtgtcaccgcattttgtatttggtggaggaacccagctgatcattttagatgagtctcttcttccctttctttccctgccaagttggtgacaattttattctgatttcgatctttgtctgtgacttgccacagcctgtggtcagggtttcctttgggacctcggtcctgggaggctgatctctctcctccctattcagacccctgtatgcctcagctggtcactgagacaccttcatctcctctgaccccagaggcagggagctccaagacaaggccacactggtgtgtctcatgagtgacttctacccgagagccatgacagtggcctggaagatagatggcatcaccatcacccagggtgtggagaccaccacaccctccaaacagagcaacaagtatgcggccagcagctacctaagactggcacccgacagtggaagtcccacaacctctacagctgccaggtcacgcatgaaaggaacactgtggagaagacagtggcccctgcagaatgttcttaggtccccgaccctcacctacacacgggggcctagagctgcaggatcagggcatgtgtctcccctcccactccaagtcatccagcccttctccctgcacccagtaaccctcaataaatatcctcattgtcaaccagaaatcctgctgtctgtcttcatttcttatctcatatttagtttgcaacctccttaaattctaagcaaggatgaggaaaatccaggtgcccagtttatcgggtgagaagtccatggtggtgccatcaccaggaacttgtggaaaggtctgggaatggaaactcacaggtgaatttcacagattttcacaatacagggtggctaagtaaagacacttacaagtcctgcaatagggaaacaggaagtccagaatcctgctcaccatcccagccaacttagtgagccctaggatgctctgcaagatactggtgttcacgtcgctagctctggaaagtggggtgaggctggggcacacgggtgatcagttatgatcagatgggcttagggtgaggttcaaagttaaccagcacgtggctgagatctcaaccatgaagttcccaattctaaagtcaggctctggggtggagtgagtatgtgcttggtgtgtggctgagcctgtgatggtcagctcgtgtgaggggaggactcctgtggactgagacaaatgagcaaagacaccatcccaggcacagaacgggcatcccatggttgtcggggagagtctgtgtcagagtctcattctggactagagtcaaggctgggtcacgcaaggtcagcacagggtgaacatgacctaggggctatctataggcaaagtcaggctttcacgggatctcaactgccccaaacacccccatcccaccaggccccactccctctgtcactcacgttgttccgtcccctcaccccctgcaccatggtgcaccggcagcctcactcagagacaccctcatcccggggtccctgacagtgggcaatttggtcccttgaaggccttgacaggctcggttaatccatagtgcccgggctgggacccccactgtttctggttcatcagggacatggcagcagctgctgggtggccagccaggacaggaacagagctgcaaggcctgggggctttttccacaatgatacacaaagagaggggcccctttggagctcagtcccagccacccctgccccaaatcacagccgtgagctgaattgaatttcaggtgcccagagtccctcagcctctgtttgacccatttcacagctatgaaaattcaagcccatgggagacactgtcccaagcttcaccctctctataagttgtacatttttatgatgaagatctctgaacacaaaaatagggagacagaagaatagtaatgactccaaggttcccatcagccagtccgcagcatcatccattttcagataatgcggacccacccacagcagaataactaaactactccttcaagcaagggtgtgaagcaaatgctagtcatcacacacacaactggagagaatatcaaggatttcttgacatcaaaaatagttaatgagagtcttatcaaatgtcttgtgaatatcattgtgtctatttttgtcgactttgtggtgctgttgcatatttgtgatttaatttcatttctatgtggattaaatacttgacgttatcattggtgaatgtgtttttagacccattccatctgcaggtgtctcccaaattgctctagctttccctggcaaggcaggagctgcaggagcagagagctggtcccgggacctcccacagtcgggatgcaggcgccacctccctgagcaggaacccagtgcttccctcaacctctcttttcctgaaaaatggttctagcatcaagaggctcaagggggttcaggctggacattggcaaactcgcttcccaggacacgtggctacttccagcaaagccacccatgttgtgttgtcattctttcagtgacattagctgcatttgatgatcaataacttcgcgcctcagatgagaaggaaggcagatggtcaagacttcggtccacctccttctcatgagggcttccagaagggagggcacagcagctgcaccgtgcgctcaggagtgtgcttcatgctttgggaagaagaaaaaatgtacattcttcccttttgttcaccactttgataactgatgatctggtgcccagccatcctccagggcgcacagcacaatgtagtaccggagtgagctctagcgtgtgaggacatctgacatgtgggctccactgcagatatactgaattgcaatgacaatgcggctacaaaacataaacatttacccactgggcgcctcctcaggtggcatctgattttctcccattgccccaggagcttccatggctcctgatttctcggaggatgagaggttctgtctcatcatgtccctttcctgccccaggcctgggatcccgcactgacctcacctcccttagcagaaggtgatatttggagaccacactcgggagctcctttatgtccctcacatttgaataaggcagtggcagccactaccccacctcacccaccaaaatgagaccaggttgaggggtgcaggagatccttccattttaccctggaggatagggctggcatttccagtggggaccagccaggcctcactggccaggcccatcccaactaggacaagcccagggaaggctgggctgaggctcctggagtcacagataggttcatgggaagcttcccaagacaccgcactctagggtaaccagcttcttcctggagggagagggcactctctgcatcaccccagggcgtcaccaagcagtcagtgtcgagtcagctccaccagggagaccatttatccctgaccatgggagttcactcctagtgacacagtgccctccaataaactcatccccatggctgcatgatggttggtgggaaaaccaaatccactgtcctccaggaaccaggatttctagggatcctgctggtcacaggatgtcacctgtccccttctctctgtgggggtgagtgtggcagccgtgtgaactccctcatgagcagatgccaccaggggctgtggcctcagcttcctccatcacagctgcagcgggggttgggggtagaggcgtccagagagggtttttgtatgagcctgtgtcacagcactgggtgtttggtgaggggacggagctgaccgtcctagatgagtcttttccccctccttccctggtctccccaaggtactgggaaattttctgctgcttttgttcttttctgtatcttgtgttgacctgtggtgatgctttctctctggagcctaggccctggtcaaggacctctcccctccctgtttagacccttacctcagtgggtcaccaagaccccttcacctctgacctcagatgtagggcactagactggatgacctactgagactcatctgtctgtctgtctgccagagccaggctgcttccctaaaacttgctcagttctgtcctcccccacctgggcttctgtctaacgaactttgtgcaagggaaactgaggccccatctcatgagggagagggaacaaggggctcgaaggagtgaccacctggtggactttagaaggacctgaaaccctcagagccaagataggggaatgaaaactcagagtctcagggcccagtcccctggactgtgggactctggatccaggctgggaacaaggtaggaggtgcaggggcctctccaggtttctgtgggctcccagggagagagccctgagctggtctgggacccatgaagccctgtcaggagggacgggaaggctctggacatgaaggagccaggtgaagtgtcacgaaaggccatggcattcagggaggtggctgatgggtctctgtgggaggcacccctagaagcaggaacccctgagttcaccgacaggcatatcccaaggcagaaaaactgtagattggccctaaacacagagagactctaacacagactccacagacaaagagcccaggacagacagacagtgggacttgggtgagcaaaggccctgactccactgcagaagatccaggagagacggatgtgggtacaaacagagttcttacgtgagagacccactctcccccaacccagagcagctgtgtcaggtgagaaaagtttccagagtgaatctaacaagaggctcacagagctcagagaacacagccagagccggatcacgtcaggatgacagggtgaggcagcgccaggcaattgaaggtccactgtctatacaaaagcccaagtccttggaagatttccaaacaggcgatgggcaggggccaagctcagaggttttctgactgacagagttcttttaggaacatgatgtcacacccttctgagacagtgtggaccacatctgagaggtcctgcactggtactggggggcctgaacactcctcatgcactgaggtcaggggctccccaggtggacaccaggactctgacctcctgcccctcatccattctgcaggtccgctcaaggccacccccttggtcactctgttcccgccctcctctgaggagctccaagccaacaaggccatgctggtgtgtctcataaatgacttctacccaggagccatagaaggaaaatggcaccctagtcaccaagggcatagagacaaccacaccctccacacagagcaacaacaactatgcggccagcagctacctgagcctgacgcccgagcagtggaagtcccacagaagctacagctgccaggtcacgcacaaagaaagtaccatggagaagacaatggcccatgcagaatgttcttaggcccccgaccctcaccccacccacaggggcctggagctgcaggatcccagggcagaggtgttccctcccaccccaagtcatccagtccttctgccgacacccaataaaccctcaataaatgtcctccttgtcaatcagaaaacatgctgtctgctcatttttgtttatccactttccatcctaaatttttttatctccaaagatcaacagaatcctttggacttgtgacaatgcagcctgggaccatcttcgtgtttctctgagccgtactttttccatcaccttatccccatagaatgttccagaacaaggaaatagtcttcagaaggaaccagacatcttcattcttacccacgtctctgttgtgcttcctgctgccctgtgagcacgtccacctctggctgcccggggacacaccctccttacatccctatggccccgggagaacatctcagctcccttctttgttgtcctcggccctcactgtccagatgccatccctctctcaaggtgtttgtccatccccctccaaggccatgtggtcaccccacctgtatttcccctcatcaaagcctagagcatctccccttctccatgggcacactctgttcccgtcatcccagggaccctgccctcagcccccacaggccctccctataataatcactgatgggatgcttaccccctggaccctggtcactcaccccacatccccctctgggtgcctctcatcccacatgtgtcaccggatgccccagctgtattcaacattcctaggggacaagggtcggctctgctcctcactgacaccattatgaatgcctaatgtcctgctgtgcacaagttgtcaattgactggtgagttcaaagtcagattctggggttatgccaggagcttgggtgacgctgattcttcttctgaagaactcagcatgggatctgagctataatacacacacacgtgtacacacacacaatgcacataaacacacatgtccatgctgggcatccttctgggaggatcaggaaggtagaaggggctgcagtcaggcccaggtcaggacatgagcaaagcaaagctgagacctgctgtctccaggctttgggactagggggtcgcccctggatatgggagggtggggcagggttttctgtccaggccaagagggagacaggagaagatgtggacgggattctgatcagggagcagcaggccacatctcagcagtcaggggaggcgcttgctgtggggaatactgttggggactgcatggtgccaggagtgtgtcccaggtgtgagctcttcaggtgatgggcccagaccaggatgcaggtccaggctgtgtgtgtccaggccccacactgcacatgcccatccactgtgggtgccccccgtgccggtgacactccagagcacaggctgtgtgggtcacccgtgcatgtaggggactgcagagcacacacatgtgggtgtgtgtgtaagccgggggagctgaagtggacagcagagatcccccacacgtagagctcctggaggaaaccacactgccagtgaggcctatgacctcccttgagaagctctcctctgggccattgcagctctaatccagcacacatggcctataggtaggaagctgtccccatgggttcaggaggcggacttgggcagtgatctgtgagctgctccttcaggacagctgggccaaggatgctggagctcagaccttgcagtggggtctgtgtccctgtggtcaacgtcattcttcccacaacccccaattcccattccaagcccatcccatcataacctccagtgctgaggatgtggggggcatcaaggaccctccccaccattcccaacttctcaaagaggtcccagctgcaccatgtcagtggcgtcacccagccgctcacctccccttcctccctggcattcctgacaccagctgatccaggccacccaactcctcagaaatgcaattacctgggagacaattccacacacagacctgtcaacccttcccatgactgaggtggatgaacccctaagcccccaaggaagtgatattcaggtcagtagaaggtgacccccttcaccccacctatggctcacccacccatgagaaaagggggctggaccctgggccttgtgagcagctgcagggggttggggggcggggtggcctgggtcgggtgtatcaggagggtttgtgtgcagggttatatcacagtgtaatgtgttcggcagtggcaccaaggtgaccgtcctcggtgagtccccttttctattcttttgggtctagggtgagatctggggagacttttctgtcctttctgttctctctagggtagaggtctcaatctctctggggtctgccaccattgccttttttcctggccccaatttcctccagcctgtcccttcttaggcacctggtggggcatgatgggaagatcccagtgacctcttaatgctccctgctcaggcctgaacctgccgctgtcactcagggggcattctcccctgggctctgggatgttctgctccctcgcacagagtctccagtccccaaagaccagcagagcaggggctcaggctggggcaccagggccatgggacaggggaaggatgctggaaaaagttcagcttcccagggttctgggtcccaactatggggctgctttaaacaccaagaagggaggcctttgactggggacttggggaaatgaagggggacaaggatggaggaagaatgtcctgtgaggtggcgccagggtgctgggtccctcctcctcccccgggacaggcaggctgccatagacagggtggttctcaggacactcagtccaaggttagagcctccccatcccacccaaaaagagagacccccaaagcagatgctgagggaggcactcctggtgggcgcaggtgacagggacctgtcaggacagacatttgtcctaggacagccagatctcccaacgacagggagaccccatagagcagacacagcgccaggctcagaacagaaaatatacctcacatgcaagccctccatctcctggactcccaggacccggctcccaggactgacatcccctccccaccaaggggcctctgtgggaaagtggggcagagactgcaatgatggtgctgggggatatgtgaggaagaaattcacttgtcaaaagggaggagaacctaaaaacaggacacagatgccctcgtgaacagacccagaggagggacctggcaggggatgttcagacagagacgtcccccaaggaaagacgagggcccagggctgaacccagccagcgtcggggagcataggtgaggtgagagctggctgataaggaggggagaatctggagaggaggctggagcagaagaggcctgattctcctcagtcctcagatgctgaggagtttcccatcaggaggtaagcgtccccgccaccgccaagttgacctcagtacagcaagggcccagcctgaggtccctatcctgggccttagtccttcacccacctgaaaactgaggccaggggctccccaggtggacaccaggactctgaccccctgcccctcatccaccccgcaggtcagcccaaggctgccccctcggtcactctgttcccgccctcctctgaggagcttcaagccaacaaggccacactggtgtgcctgatcagtgacttctacccgggagctgtgaaagtggcctggaaggcagatggcagccccgtcaacgcgggagtggagaccaccacaccctccaaacagagcaacaacaagtacgcggccagcagctagctacctgagcctgacgcctgagcagtggaagtcccacagaagctacagttgccaggtcacgcatgaagggagcaccgtggagaagacagtggcccctgcagaatgctcttaggcccccgaccctcaccccacccacaggggcctggagctgcaggttcccaggggagggggtctctctccccatcccaagtcatccagcccttcttcctacactcaataaaccctcaataaatatcctcagtccaccagaaaccctgggttttgtgttttgcttctgtttatacattttctaccctaaattggtccaacctgcaagatgaacaaaattcttttagccttgtgggaatgaagtctggattgtttttgaggggtagttccaccatcacctagaaaggcccagagaatattccagaacagagccttgggcagcaggccccaggactgcccctttcccatacgtgctgtgtttgtgtggacatgtccacctccagcggcctggggcgaccgctccttggttccccatggcccagaagaacgagtaccctccacggatcatcaggcctcacccctggacagcctccctctctcaaggggtccctccttctgaggcggaaggagcctctccagtccatgggcccttggtctcccctactccttaggggcccaccctgttcctgactcccaggaccctgccctctacccccacatctatctctgaagcaggcacagactggaccctgaccctctggacccaggtcactcaccccacaggccagctgggtacccctggtcccacatgtgtcaccagtgtcccagttatactcaagtcccctgggggataagggtcaactctactctctctcacccctaagtaaccagcccaaaactgaccacacctcaagtacctaatgtccagttatccacggatggtcagtggggctggggaggtcaaagtcaatcatgagattccagagtggtgccatagacgtgcctgtaaaccaattggtctttttaagagctgtatgtgggatctaagaaccgggttgatgattgtcccaggaggtagcacaggatggggggcctgggctatgagacaaacacacatacatacatgttcacaaacataaacacacatgaacacctcataggcacacaggtattcacaaacaaacatgcctgcatgcaaatacatacacacacactctcctgtgctatttagaatcattaccacatgggcatcccactaggggctgtgctgggcatccaggaccctcccagggaactcggatctccataggggaccagctccaccttccctgtggcataaacaggcttctcacttcttccatggtgacagtctccaaaggagctgagccgggacacatggcttcctccaggacagagagtagcaggggacccagatgtgatgtgcagacatgcctcctccctctcccctctccctctgggggtgaagggatccctgacttccagtaaagtgtgcatccatgcatggaggggccatccccctcaccctcctatcggccagacctgcttcatgacagggccactggacctgggcgcccaagctgctgcagcggggaacgggtcgggtgtgtcaggaggggtttgtgtgtggggctgtgtcactgtgtgctgtgttcggaggaggcacccagctgaccgccctcggtaagtctccccgcttctctcctctttgagatcccaagttaaacacggggagtttttccctttcctgtctgtcgaaggctaaggtctaagcctgtctggatgtctggaatctttgcccctccttgcctgggctcctgccctcttctgtgattctgtcctctgtgggtcccagttacggggctgcattaaacacagtgacaggaggcctttgactgaggacttggagagatgggggaggaaatggcaggaggacaaagatagaggaagaatattccgtgagaaggtggccccacagcgctgggtcacacgccatcccccaagacaggcaggacaccacagacagggtggtgggtctcagaaaactcaggccctaaacgtggatgcttaccaattcctccactggaggaagacctcagagcagatgcccaggacagggacttctggtagggacggtgactgggacgggtgcctgtttgtcagggaaaacccactggagagtcagatcccccagataacttctcacgacatggagactctttcgaacagacaaagctccacgttcagctcagggagtaaaaaaaaaatgcctcaaatggaggcctttgatctactggaatccagcccccaggactgacaccctgtctcaccaggcagcccagaggggtctctgcagggaggtggggtgggggctgcaatgatggcaccagggagatgtgtgggtaagaaacccactccctgtgagagagaagagcctgaacccaggaccaacagctgccctgcatgaagagatgagaacaaggggaactggtaggaggtgttcagacagacacccccaagatagacaaatacccagggtgagatgtggtcctggactccatcccatccagtgtggagccagcaccggtgggggtctataggtgatggaaaatatgaaaaagagacagatccaagagggggtctgtgacccccaagagtgggggcaactcccatctgacagcgagtgtctccactcaccgctgacctgacctcagtccagcaagggtccggcctgaggtccctgccctgggccttagtcccatacccacttcaagactgaggtcaggggctccccaggtggacaccaggactctgaccccctgcccctcatccaccccgcaggtcagcccaaggctgccccctcggtcactctgttcccaccctcctctgaggagcttcaagccaacaaggccacactggtgtgtctcgtaagtgacttctacccgggagccgtgacagtggcctggaaggcagatggcagccccgtcaaggtgggagtggagaccaccaaaccctccaaacaaagcaacaacaagtatgcggccagcagctacctgagcctgacgcccgagcagtggaagtcccacagaagctacagctgccgggtcacgcatgaagggagcaccgtggagaagacagtggcccctgcagaatgctcttaggcccccgaccctcaccccacccacaggggcctggagctgcaggttcccaggggaggggtctctgcccccatcccaagtcatccagcccttctcaataaatatcctcatcgtcaacgagaaatcctgctccctctcttcttttcttatctcacacataatttgaggcctcccctgggttctcagtgttgggtgggggaatcctggcacccagtgagaaagtggccctgagggagaggctcatagcctcccggggtgtctcctggtgaaagaggcccggataggagaagtctgatcactgaacaccagtccctctgccctttcattcctcccccttctcctcaaagcatagccccccacctccctgcctcctgcctggatggagttgtctctggctgggactccagttacaccctctatctctgccctaacagagacacccttcacccaccatctcttttcccagcctgaaaaccctgctccaagcctggagcctctttgcccctggcccttgcccccggaatgccctcctccctctgtgcccagctcagctcccacccaccctcaccccctccctgtcatccctgagagccagactgtccaggacactccagcaccactgacttctcaagctgttcaatgagggacccacctcgattcctcacctgacagcaggttcagacacttaagaggaatgggaggaagccaggaaggagactcacacgaaaggcctacaggaggctcgggacacttggaaaagataggctctgagctccctaggaaccagtgcaaggagggtaataagcacttcaccacttctgtaaatttaaacaaaccctttgctgaagggaaggtggtgttctcaatgctggggccagtcatctcgtcacaactaaaagtgggaacatgttctatccaaggcctcagtagtaatgggatgtgaaccttgacacacgcacaggtaactatctggcagcccttagacatggtgattctctcaagtgcgtgaacagaaagtcactggccgtctttgggaacatcatttttgggaacacttctccattggatcccgggccttcactggaaaaccaggtccctcatcaggactttctctgtgaggttccctgagtctggggctccaactgctctctgagaggaaggggtgggggaagagaacacgacccagccccacccagcccctcctgcatggcccctcctctgtagagtgggggcacctgcaggggtcaggcctgggttactgtgggtggggcctgggaggggcccttgtggcatcctggggagtctctcccacggctccttgtttgactttcctgtggctgctggctgttatcacaaatgacccctaatttagtgccttaaaacatcacacactgattctctcccaggtctggaggtcagaagtccaaaatgagtccttgggggctaaaatcagggtcccagcagggccggctccttctggggactctggggagaattcgtttccaggacttttccagcttctagaggacaacctcagctcctggccccttcctccaacttcagagcctgagctcagcatcttcaaatctctctcttgctcttctctccctccctaccttcttctctccctctcttccttctctctctctccgtctccctccatccccacatcttgtcctctcactctgaccctcctgcctccctctttcttctataaagaccccagcttggacccacctggataacccaggagcatttcccacctcaggctcctaattgacatgacatctgcaaagtccctgtggccacacatgacacatagacaggtccaggattgggacacgactgtccccgcggggcctaatttagccgaccacagcccctttcccgagttcctctccctttctccatgccctgcccagtccaggctgagccactcctggggggccgtcccagcccagcccaagccctccctatccctggtctcttgtggccccttctcctcctggggttccaggaaggcactgggagtttagccacagctctagggcactgtcttccagcaggccccctgagactaaatgccctccaggccaaatcacccttggaggaagatcctattgtgatcctcactctaggatggtgacatcacagcccagagagcctgagtgacctgccacaggtcacagtagggactcaaacctggtccacccaactgcagatctcagctctggaccccaggtgcctggctgccctcagcccacctggccacgcccacccacttcatccagcttcctccctggagagctcaaagcccactggacccaggcccccatcccgggacccgggattcaagtgacagaattattggaccaacaagggatggaaggggacggggcctcaggttggagtagccagattcctcatgccccttctccttcctccgggtcaaatatcagggtcagggcactcggagggagggaccatgagagtccccttttcctagagaccccatctcagtcctggttctggatccagggcttacggtgtcccccacctccaggagagtcagtccctggcaggtggctccccaagcccaatcccctccattcctggtcccagttgctccctcaacatccaaaaattcctgacatcttcagtcagggactgctctcccaagggaagagcacatggggctctgggtctggggctgtgggaaagaggaaccccggtcctctcggggcccagcaccgagcgcagtaggtgttcgaggggggctgagtggtgacatgtgagactctttgtagaaccccagattcaggttcgtgtacctgatatgcagcggaggtcaaaaactgacacaagtgcttggagatagaaaaagatttatttcatttggctaaagtaagaagacaagaaagcaaattcctccactccatgttaacaaaaggatgaagcagggagtttttatgtggctaaggagtgagggaggtggcatttcaggggaaaagtctgtgtttattcagtctcaggtaacatcttaagcaactagacttgcgggcgacagcggctggtctctacgtccctaaaggcattcactcctgcaaaatacttttgtgactctgaagttatctcctccttcttgacaaagaaacaggacatctgcagcttatgatcacattgtgtgaacaagggatgctgggcaaaaagcaagcagttaacttgtacaagcaggcaagggccaaatcagaattttctttacttcagtcacaaaaatgctgggtactgaaatctcaactcacctggtgtcactcccagggcacaggctaggacaacacgcacccgtccctggagaactctgggctggttcccccttctccccctgctgaccccctcttagtctacctccgctcctcccttcccccaccggagaacctcccagggtttccatttcctcccggataacataacacgtgctgccctgtgaggaggtgctaaagtcaagagcaaggtggcagggggctttcgagcaagaggcgacctgacttcagagaccctcagtccccaagacagacgcatgccctttgagagagcggccgccccaggcacacgcaggctctgggctgtcaggatgggagcacgtggtcctcttccacccacctcccgaatctcccctgctccccgcacccatttccctgtggcccccatttccctgtggtcactgtaatcggaccccactccagtccccttccccactgactctgggagctggggttgatgctggggctggagcagtgaccagcccatggtgaccccggccccatccaggtactaggccactggccaccaatcaactatggtttcccaagcacccatatgtgcccagcctgggcttgggacccaggcctagtcctgcctggcccactgcagcagtaatggtgggctcttcctggagagaacctggaccacagtctctctgcctcaacatctcagtatgaagggccagagaccctcctgatggtcaccttaggagcacaaatgtggtcctgccaggaagaagtaataaaatgtgaatgctgccttcctctggctgcccctccctctctcctgccttttacaagtggtaatcaagggctcctggcctccacggtcccctcccttcctgcctcaagcccagcagtctcaccaccaccccatcacagccccagtggcctgcacgtggctcaatccaatggtcccctcactgtcctccttctgttgacctcaggatgggcttggcaactcacatcattctcgtcatcttgaagcccctcacccacccacccccacccccccgcccccccgccaaggtcctctcttctatggtcccctcccactttgttctgctgctgccccatcagggccaccggcagctagcacccttggtgactctttctttcactgtgtgattcatgaactaccggaatgtaaaagggttccttgctccttccccggccccagccctcagcccagtggtgcctcaggcttgatggctgcccagggctgctgaccacgctctcctggtgccgccctgcccagcaccgatctgggacaccacgggagcctggaagcaggggctgcacccctcacgtcctccgatgttcagccaggtgctgggctgggtatcactgagcccctcgatggccactgctcgacagtggaactgctcccggctctgctgaagatgctacctcacctgccacctggcccagggccacttccagggaaaccctgcactggcgtctgtcctctctatgtcatgggatcccaaaccaccccaggaggcacgtgtccatgtcccgcacaccttacagatgaggagacggagattcggagaccagcagcctgcccgagtcccacagctgcccagggctgcacagatggtgggcactgggactctgatccaaggtcaacccagagccagccccttccctaaggcgtgcagaggaggctgagcctgcccaggtcctgcaggtgttcagggcagcacagtggttgcccaggcccctgacctaggccacccttccatcctgaggccgtgcctgggcaaggccaagagatggtgctgagtgcatgaacccccttgtggctctgtgggatgggcagacctgggctcctcattctctgttgactcagtgggtgaaagaggcaggcaggagggcagccatgggggtgccctctgagtctacaaagcagagccaggacaggtgttcatgtgcccatttcacagatgagaggactgaggctccgatgggaggggtgatgacccacctagggtcacacagtaggttaccggctgacccatgcccgcctcttttcatgactcctcggccctaagggcttttcattcattcattcatccattcatttgttcagactcactcattcattcattcaacaaactctcagctgtgggccaggggctggtgtatgcagcccaggaccacctgccctagaggagctcacaagcttggagaacgacatggagacaccactgcccccaccctgtcaagtctccaaggttggcactctgcccagggagtgtctggggcagcaggagcatctccccacactcaggaaaagatttaactgaaagaaccatctgagagagccccagctgtgatccttgggccacagtgggaacatcacagtccctcactgaccctcacagtgaccctgaggcctaaagctgccattgcccacctcacagaggggacgtgaaccatgatggatgcaccagcgctgcccaggctccacccagttcaggagtagccgagttgggccttagcccacgcctgtcttcacatgccactgtgtctagctcagaccggggccagcccctcacgagtgatggcctcatgacaccgaaggagggttggtctgtgctgggggaacccctcaaggtatagggaagagtgtcacagtgggggatggggtgagaggaactcgtcctggccctggccctgcttagctgcagcctgggctgagggaggtgttctgagtcagatcagggaggggccctgtggcttcctctacagcaaagccagagcccagaatagcctgggagggggtgcaggggccctgctggaggagaggggggtggctgctcagggccctgcgggaggaaaagactgggagctactatgaactgagtgggtgactctcccatcaggcccagcctcctgtggggcctgcaaagccaccaagagagtgtccccagccaggcctggacaaaggcaccattacccttcaacccccatattcactgaatccaggggcaagaagggggacatcgacactcacctgggaacaagcaaaccagctcagatgccccataacgaggccaccagatcccaggcaagcccccattcctcaacacaaaggtccaaaatcaagtttccagccaactagaacatgcgaattttggggacatagaggaaataatcaccatccactcgcaatgcccactgctaatgacacagcacaatgctgaggatgttgctcctccctcccgacatgtcatcctcttctccagagtctctgtcacaccagggccaggttctggattccccacccaccccgcctgcaggacacgagtccttgatgttgaccccacaccctgggctccatccctgacctaaggaccagcttctacggccctgaaagagtcgtgtgtcatgacttgacactggtcctcttccctgtgctgaatgagacgtgaaggaaaaatgaacccaaatctgcccaggatcccctgcgccacacgtgagatgctccagttccctcggggattcagaagcatccctagctggcatcaacggaggccgggaagactaggtcttttcccaaaatgcttagttatgcaaacacctcaaaaggcacccgtacctcttgtaacaacccaagcgtgaggactccctctttctggggtgatctggggaaactgctctcctacatggtcatcttgaggattgcagatgggccacggaaatgtcaacacagtgacatcagcaggggcagtagggtcaggatcagggtcagtctttgtcacttggtcacttgggaccacatcaaacctgaccctgtttggccagtaatttcacaagggtggtctccccaggaaacacgtgggctgggcaaggtctgaggggagggggatgacctgcatcctgcattttccaggacattcccagtttgtgccactgactctggaagctgaggtggatgctagagcagtgtccagcccctggtgaccctagccccatccaggtccccagaccactggccaccaatcagctgcagtttcccaggtgcctatgtgtacccagcctcagctcgggacccaggcctggccgtgcctggcccattgtagcagtaatggtgggctctgcccagagacccaggcctgggctgcctccaggacccccacccacatctatcagagagactcgtgaagttattaatagtgccccttccactcccaggaacatcccagtttaaacaacaaactttggttgcccaagctcagagtaaccgtttgctaaatgactgaatgacgttcttcataatggctaataatgagggggaggaagccaagcccagccacctagcactatggtaagcagtgctggacattacaatgggggccaggggccaggagagcctcactaggggccacatccaggcagtcaccatgacattcctggtcccctgcctggagcccctagaaatgagctcactcaggcccagctcacaacacaaccaggggtggccctaataccatctcccactcagcaacagcacaccacgtccagagaccggcaagggacagctcctctgggcagccctagttcctggggagaccacaggcagcagggagaatgcctcctggctttgggacaggagccagggaggggctgggtgacttctgtggctggcaacacagagcccccgtgtcagctccaggaaagagtagcccacagccaggacgacccaccagggcacccgcagtgtgcctctttccatacaggccatccttcatggtgactctctcttcctatagcaacaccaacacccttgatctggccacgggtccctcctgcttctcacatcaggtctgatgtccactgagcatccaatgtgccagttgccgtgccaggcaccaaagcctggacccctcacaggtgtcactaggatgggccctccctgcccacccagttcccagcctgtgcagggacatgttgggactttctgactatggaaatgatagaggagaaaggggcctcatcttcacagtttcaggccaaaggggagcctcccactcagacccctagacacatcctctcctgacctgtctggggaggaggatgggaagtggtggtcagacttggcctgggctcccacaggggacagaaagtttgcaaaggtctgggcagcagagagcagctcccagaaggaaggggtgctggtccccaggggctgctgggcagagtagctgaagaaggtgagaccccagaccggccaggtaagtaagcccccttctcaggggctgcccagagcgaagtcacatgttcagctctcttctgaggacctgctgctcctggaaacccagcagggttaaggcaggcacagccaggttcagacagctcatgtttgcgggagagggaaatcaagtcaacagacaaggaacaatgtcatgtaggaggcgggatttgtgctggggagaaatagggcagaggatggggggtagggagcacctggctggggtctcacggggggcgacgtcccaggggctggaggcagccagcgactgaggagccctgactagcgccaggcccctgtggctggagttagtggctcgagctcagcctcagtttcccctctgtgcagctgggttgataataatggaaactgactctctgggtggggggagggacaatcagatggaaaatagatgttttgtttgtctctgccgttggttgttttcatccttgggctgttccagccccagacagcctcaggccagccccctgcccatgctgggctccccaccggccctggaaccctcaccccagtgcagctggcctggtgaaaccaagagtgcctgaggcccgaaatagctgggaaaccccaccaagcctcagccctggcagcaggtgcctccttctccccagggtgggaggcaggggggcgattcagtttccaaagcttccaccagcccagctggagaatggtcctgtgtccccgcaccaagacacccaagccccgtgcccaggcttgagttagacagggtctggagatcatggtcaatcaatgatcagaagtagcaccttctgctccagaagcttctattcatgcaggccctaccccctcctcacagctccccaggaaccgttctaaatgccaggttcagagctgtgcccaattggggggcacagccagacacttggagctcagaggggcctggggtgggcagggctggccagagctggacatgggaccctgctgatcacactccacctgccgcccccaggtcttggacccttcaagggagctgggccaagtaaggggatgggaagggaaacaagaacccttccaagagcttccctgggagcccagagcctgaggcagtaacgaagctcctggaagcacagctgccaagaggacttccggggtccctacccagtgggcaggacctcagactggtcagtcacttatttgtgtgtctgtccatccatatatctgaacatgcacacacacacacacgcacacacacacacacactcatccttccacaagccccgaggcctggcctgtgcagggctcttgacacatggtgtcccaggcaaggcaggactgccccagcccacccccaggtgagacctggagtgtgccttctcatgggaggagggggctgtggccttggggtgccccattccctgtccagtcttccccatgctgggtctagatgctgaggtcaaagagaggttgacaggtgtgaggaacaggccactgtggtgaggcttaatgccccctgtccgatgaccagatcctacccactgcccccgttacagacctccctgtctttctccatgtggaggaaacgttcccaggatattccagggctccaggttctgatgagagtatgggaggagaccaagtacccagcctcagggcctgggttcacccctgcagacggcaaatcccatccacctgtgggacttcaccagctcattcttagaggacaccagcctggagctcccttggcccaggaaagccaggagccaggcccgccacacgtagccattgcacatgtcacctgacacataagatgcgaactgtagggtgggcaggccagggatgagtgcccccacctctgccttcctccccacaggcccacccacgaggctgaacagggtggccctagacccagcaccatcttcaatcagctcatccactggcatcccccaccaccgtcccctcaacatgcacaggatgccagccacccaggccagttcctgaagtaaagcaagcaagggggggtacttgtccccgcccagcccagagctcagattgcagatgagacccccttgcttgaagaagacaaggggcaggagatactggggattccatgtggtcatcaaaggtagcctggtggcagcagcaacctcaaacaggcctaggagctggatcaaggactgaagggcagagagaggacgggtgtgttagggggtgagtgtgagcaaaggtataggagtgaccacagcatcccttcttcccacagggccacagtagtgcacaagggccctcatggaagcaccctgaaagctcacctcaaaggccccatactctgtcccccacgtcacctggcctgccaccctacttaatacccaggaagtccttggagtctgtgccacatggatgggctccaagatggaccaggcttccaggggggcagggaacaagggagaaaagaggtctgggccctgcataggacacaggtagtgaccacccggtggaggagagggaatgagcagaggatgctgggagccaggcccaaggcagggccctgcagggtgcacagttctctgggttggacggtggaccaaggccatgaacattcatgctggtccaggccagtggaccagagtgccccaagccccagagctctgcagaggggcaggggcagggcccagagagagcaaggccgagagtagaggccctaaacctcaggtctgaccagatctgcaactctacaggtagctgcatcctgtgttgagacgctattgagtggccttattgtcccgtaccatttataaaacacgtggacacatgttatccacctgagccactcagggattctgtgaggccacagccagaatcatggtcccatttcacaggtaggaaaactgaggcccagagcagttagatcccaaaaagccagagccagctctgtggtgtcctgacttccagcccagggcctcccatctgacaaatggagaaacagaccaggagagaaagggatctgcccgagctcacataggcgcccctgtgtggaggggcccatgtagaggggcccatgtggaggggacctgtatggagggtggcatgtggaggggcccacgtgtggaggggcccatgtgtggaggggcccgtgtggagggatcgtgtgtggaggggcccgtgtggagggatcatgtgtggaggggcccatgtggaggggcctgtgtggagaaatcatgtgtggaggggcccatgtggaggggcctgcgtggaggggcccgcgtggaggggcccgcgtggaggggcccgcgtggagggatcatgtgtgaaggggcccgcatggaggggcctgtcggtagggtgccaggtagaggggcccatgtggaggggatctgttggagggtgtctgtgtggagggggcctgtgtggaggggcccgtgaggagggcgctgtgtggtgggacccgtgtggaggagcctgcatggagaagacctgtatggagggtggctgtgtggaccactgccctctgccagagaccagattgttcacttcctccaccattccacagctccagccccatttcaggggtgcagaaaagaggcctgaaagcagcatggatgagagttagggctacaggccctgatggccattccttccctgtgccttgggagatgcaaggaaggagggtggctgcaaaggcctgtgggagcccagagcactgttcttcccaaaggggcatctgccctgggagcccagacctcagtgtcagacagagaaggggtccccccaccatgctcagccctcatcaacccttgaccttgagcaatctgcttctcttctgtagccctcagtttcctcatctgcccaagggggtgataagagtccctccccacaaggtaggtttgcggattgagatgatgcctaagctgtgcctggcctatggggaccctcacctaccctcagtcattgctcttgcctgggcctgcgggtgacactgtgtgaacctgggcaaatgcctttgccttcctgggcccagccttccctctggtcaaggaggaactgggtcagggaccccgagtgccagccattcaggaaaccagcagattcctgggtgaaggggttggccagggaggcctgagatgggagtagggtgggggccaggccaagggatggggttgggggatgcgctttcccagctctggtggccctgcctgcagctggccacccctggaaatccccaggctaaatttaaccccaagttggctgaaaccagaactcagagtgacaaaaggagaaaaataagaggaagagaaactgagctcatggccacccgggcatgggatgagtgacaaacaggcccaggtgtggcccaggaggagcatggggcagtttcagggctgctgctggatgtttgtgcagctcacaggtgggggcagtagagcctgcgccccaccccaccccctcctagtccagcccctgggcctgatgctgccccctggctgcctccccacaccctgagctccatcctgggtcccagggtccaccagaaggcatctcagaaccagccagcagtggccctgattgtcagcaggaccccagggaggggggtggccaggacagggctctgaagcccccaccccaggaccttccctgggcagaacgagttggtgagggagtgatgagcaaccacaggcctcctaacttcccaagctggcgattctgagaggcctcaaggctgagacacggttcagccttttaggccctcctgaacgtgtcccctgtctccacagcctgggaatgcactctcttttgacccagaaatcctgctcataagaatttatcatggagatgccagagggccagtgcatgtggatgttagccagggagctaagagcaaaacgtgacagaaaagagcccgagagcagatgccagcctcacatccacatccccagatggccttggagaagggtcatagacagatgttcacaacagggcaagaagaagtgaggaaagaagttcccatctttgtgataaccccatgatttcatgcagaaaaagatctggaaggcgccataccaacgcgctaacagggcctcttgggcagtgcaggatcagagacttgctttgtattcttatttaatttttcctgttttcagattttataatcggagaacaaaacattaaaccaatttaagatgtaagatcctataaaaatgctgtattcgatgatgcgaatggcatctgaaaagccttgaacatattatcccaaagaggccaccagataagacgtgacctgtgtgtgcatgaatccctgcatttttatccatacctagatgcacatccgtatccacatctattccccggggctaccggttgcgggggtaaactgtaggtaatattggttttcattttgtacatctaacttttttcattttttgacaatcattatacatttattattatgaaaaatagaaggttttgtcacttaaatcaacatgtttattccaattcacttaacattcagcaaatatttcttgtgtgtctgctacacccacaacagtcagggtgcagggtttgagattacactgatgagaagacagagtgttctctcttgaggagtagtacaatgggggattatatggaagaggtcactacgatcctaacatggattcgcatcctgtatgtcttaggtgctgcccaaagcccgaaattgtctcacagctccagccagctcagaggcaggaagcccagggaaagttgccgagtcataaaaatggaaagagagggcattccaggggggatgagtacctagcagccgacatttagcaaagaggattggaaaatgaacccccccttaaaatacagttaaacacagaggagggagcaactgcaaacaaaaagtttaagcgatttctgcaaagagcaataaaagccatagagcagcttgggacaaggtcaggtcaggatgagcagaagttgggaaggaaagaaggaagccaggatggacttggagagtttttaccagttcctcaggcaggaagaattgtatggtaggtcagagcatatttctaggaagacctcggttgacaaatttctctgccactgagagatgacaatttaccttggtaactaatctctctcctcatgttcccatctatttgatattgatttaatatgagtagctacctcccatgtgtataataggaaatgtatgggagaatgcatattaattcctgaatagaatatctggttccatgaatgatggaagttggttagaatttattattggaaactcaccctgcactacctatagttggtttattttaattatacttatattcattatatagtaactcatatatatttgtcatttcttttcttatattcaaaaagtctctacataaataaactctgcacctatggtcattgctgggtatctgttctatacacagcaaggagccagacgccctatcttacttgttcactttccagcttctccttagaaaaaaaaatacaagtttttaacccaattctatgagtctagtactgtgacccaaaacccaaagggcaggaactcaacagccacctctccatcctgcctgcctcccaacccacattccccttccagaaccctcactgatgagggaaaagatgatgtctccaagaggagcagcccgttcacacatcttcaagcttcatctccccagcagccatccaagtgcctgaccttcaaggctctcaataaacagtctgaatgaggaaagaaagggagggagggaaagaaggagggagggagaaaggggtaggtggatggatgtatagatgggtgagtgattgatgggtggattggtaggtgaatggatgagtggatagttgggtgggtgagtggatggctggatagatgaatgcgtggactggtgggtacatgtgtgggtgggtagttggatgggtgaatagttggataagtaggtaaattctaaccatgagaagcacagattggtatctggcaactctgtgtagagattagattccaattcctgctctgatcctgactcgggtgtgatcttgggccctttccttaatgtcttgaagccttttcccttcatctgccctgcccatctcacaaactgctgggaagaaccctggaaggacatatgtgcacgaagatgctttagaaaccctagcaagcttctcaggtgtgaccttagcattggagggaacttgaaggtcattgggctgactctcccgatggttggatcacagttcatggtaagagcctaagcttagagtccagacagacctgggtttgtgtcctggctccaccacttgtccgagtgtgactgtcctgcctgtgtactcctctgtgatgtggaggtgatgatggtggcagcttcccctcagggctatgtgaggattcagtgggatcatcgtggaaagccctgggcacatcacccagcaggggtgccacgacgaaacccaaggtctgccctccggggtcccaaaaaagaggcccagtcttgcctttccagagcagggtaccctagaggccatgggattgaaggagagctctaggatgtccagctcacgggttcacaaaaccctgaaaagtgtctgtataaatgctcattgcagggaaagatctgtggctttatacagaaagaggccatgacacataaagggttaaccacagtccatctaatccaggactctcacttaggaaactgagacctatgtcctgtccaagggcactctgtgggtcaggggacagcaaagcacagacattcaacccagcatggaggcccctccccacccaggagcaggagcctgccttggaatgccagacctgagataggattactgccacctgggaacagcatacactggtgagaggcaggggcagggagaacaccaccacaggggcagggagaacaccaggatggggaaagggaaccacagggcctactcttttaattaagcagtagaattgtaagaaaattgcaactttcttttaaaacctgtctttcaaggttgttaaaatggggttttaataacaaaactgtgggagaaagaggtggctgatgtcaaaaacatctcaacccactcccctgggggacctgcagttctctagttcgtgagtttctgctaacaaaaagcacactaaaagaggggccaaaacaaatggaaatcaagcttatcaaacacagatgacatggagttgaccaaagcatctagagctgagattccaggaagcagatctctctcctttctctgggaccatcctaggagaggttccagggccccctggcacagaggtgccaccagcgacctcaaacttcaggcgcaggtgggggcaacaggcgtagttgaggctacagggacacaggtgtcagcacagcatacgagagggccaccttgtttgttttctgacttcctcttaaaatacagtttatcgcccttgatctttagtttcaaatagtaactattcacagtaaacaatgtgacacagtaaacaacgtgtacagaaaaacaaacaggagaaaacaatttgccccttgtacttcacccagaagagccactgctaatattttgatgtatttccttctattttagttgcaaactgtaacaaccattaaataaataaatacgatgaatttgtaaagtttacagagtaataataggagtgatgattgcacaacatcgtgaatgtactaaatgccactcaattgtacactttaaaatggtgaattccacatgatgtgagtttcacatctattagcctcctgggctaggaatactgcctagacctcaggaaccacggaattcatcatctctttccttttccttaaagtttgacctcctgtgtgtgcccttcaacaaacggtttttcagcttgtcctgcttttgaacttcatacggattgaagaagaccatgtgtatttttcatggtttgcttctttctcaacactgtctctttgatattgatgttgatgaattactcatttcactgctgactagaagcccactgtgtggaggtcccatcactcagctgtccactctgctgccactgacacatgggcagttttgcccaggagcagggcatcagaaacacccaattggagtccagtgtgacagtttgtccagggcctgtcattgtacaacacatcatttcactttgtttttcaaacatagtgaattctttcctaattaaagaagaaaagagtataaagagaaagtttccagtgcagcctggagatctgtactggttgtatctggaattccagactcagccttgcatttcacatagcagatagatgatgatgatggagaaggagaagaagaaggaggaggaggaggaaagaaggaagaagaagaagaagaggaggaggaagaagaagacgaagggaagaagaagaaggatgaggaggaggaggaatagacagactgacaaagattctctactgttgtcacttaacaacatatccatgcaggtgtggataaacctgggtgcgcatcacactgggaacaagcagctccaacaacactgaggcagcctcttcccaagtcagctggacaattaggctgctttgctcaggtcgttcactgttctgagcaggacacagccaaagcccctcgcccccacctctgtgcaaggatccagtgactgacttggggttgaccctctctgcaaagatcaaaggtcatgcctgtctaaggccttggacgcatgtcccagactgacttccagaaaagagagcctgaactgccctgctgagtgcccaaagaggcccccctgcatccacgaaaggtacccatgagggtgtggaaggagaggcatccacaggaactgggctcccacctgccccacctgaccccagctctacactgagaataggggagatagaggggcccccagggcctcctccaaactccccagagcatccactgtgaggtgacctgaaccaggccccaagctccctcctcagggaggcctcagactcctccacctccgcagcctccaccgtggctgctctgtgtctctctctggcagcaccaaccacccccactgctactgacaccaccattggagaaggctcagggctatgagttcagcctctggctgctctggagatctagggaggcaggagggctgcaagtgggggctgggagagctattccaggtcaggggtctgtgggctggagtctgtgaggtgtgcacatgtggggctgagggatggctggagaggccctgttggtggccactgtctccaccttcagagcccaggaaggagatttggcccctcctgcatcagataatccctagctccttagttcccaagtcttcagtccccagcctggctctcctggggtggctgcccttgctgtgggaggctggggggatcttcagcccagcacctccagcagcagggcctggtgcccccagctctgcactggcccaggtctcagatcctgggctgtcagcccctcatgggtcccaggtgcccagcccagctgccccaggaggcaggggggtctgggggacaccaaaagagtcttagagaatggacctcaccactcagccacacagaaaaactgaggcccagaggggacaaaggacttgtcatgggtccagctgtgagcctggctgccagtcttaaggcccagtgctcccccacaggatgctgtcacacacacttggccctgatgaggtcccctcttagctgggatccagccccatgaccagcaccccgaggctgcaaagggtgctgggctccagcaccccaagactccacattgaccccaagactccacattgaccactctgagcagaggagcccttgggtctttggggaggttagagagctggcacccccaccccagtctacccggccccggggttcctctctggatagggggccccagtgcagttcacacaggccctgcacgtgttccttcctcagggcatgcgtggctgaagcttgctcaacactaaacatcccagcccagtttattgaatgtgagggatacgcagggtctgagcagagcagccatcccctcctgcctcccctccttccagcgctagagccagagtgactccactgtcctgtgcccacccccagaccaaggagcctcaggaccactcttggggcagggagctcgaggctataggaagattgccccagagcaggatggctgagtgttcaggagtccagccatgtggtaaccgtgcactgcagtgtcacctgaacagggatgtcaccacgtgaaggcatcccagctgcatccttggctgacatatcctaactgtgcctgtacaaggggctccacacacacacacatccacacacacacacacacacacagtcacacttacatacccattcatgctcacacatttatccacacacattcatactcattcacacacacacacgcattcacacactcacacccactcacatgcactggccagagccagagtcgatagcgccctctagtggccactgttgtcccttctctagaaggtctctgtcttatcagtcacaacccccaggagtcttcatccggaaatcccaggatgcacaagtctggcaagatcattatctcctttcacagagagggatgtgacctggccaaggtccctcatcaggaaagtggtacagccctcccctccacccaccaccaatggtccgggtactcagattccgaataactccagctcctgaggccctgtcagagcccagaggctgggccctctcccaagggaggggctggagcagaggatctgggggcccttgtacacccacctgtcacatacacagggtgcacggtcccccgggagggaagaagacaccttgggggagaggaatttccaggccagagagtcccagaaacggctctcctctgtgccaggtgggacggggtataggaggggagggcctgcctgggctttaggaaaacacagaaatgccaagaacattgacacacagcagtaacaaatgctagcctgctgtcaactatcacaggcttttactgagaggaaaatacaactgatcaggttagattcccctccgtttccctcccccttttccctgagagaaacccagtgctgctcactccacatgcagccattcaacagctctggatgtggctttatgcccaggggacccagtggtggcctcgggggccaagccctggaaccaagtgccattgggtgacataggcctggaacaaacaccacgtgatgctgtcatttgtgatgtgatgagttctttacgaaaaagacagggtcaaacgggagactgtgacaactgctggtttagctggatggtcaggaagggacacccctgagtcaatgaggggaccggccagttgtggaggtgcctggggaggagcgctcctggcggcagaaacagcaagtgcgaaggccttggggtgagactctgctgacgaattgcagaaacagcaaggaggccatgtggccagatccaagaagagaggaggggtgagggagggaaggggtagagggagctgggttgcaggcgggggtgggggttccttggggccttacagaccatgctgagcagtttgcatttgttctcagttttcaaatgcacctgaacaacatcatgtggaacctgtcacgctccttctaacttgctacatgtatatctctagtactaggagatgcaactagataaataagacagagctccatggttcaacatacaaatagacgctggtcccggcccatccccagtggatggacatctgggctgtctgggttattcattcacaaacacaggccagtgagcccctgcatgtccccgtgcatacatcatgcctcccaaggacacacactcaccctgtaactagagggacacacgtctatatttgggtttactatgaactgagttctccccagagcagccagactaatgcacagcccagcagggccaccatctcatgccccacaaccacaccctgccttggaactgtggacgattgggatgttcctatccccagagagcacagacatctggcaccaaatgagaaccaggtaaagcccaagggcgaggcccagcccgccgggcgtcactcgaaggtcaccagaccctgccaccctgatgcccattctgctcctgcctcgttgaccttggcctccctgagcctcagtttccccatggttttattcagaggttgcagtcctggtccctactcttttgagtctgcacagactggggcccttcccagcactgctagcatgggggcagagacccttggtggccgaggagggtgaagtgggccaccggagccgggatgggattgcaggacaagagggggccaccgggttgggtagtgcgacccccggaaagcacagggagctgtgcccctccacaggattcccgccctcagagcccctcccctctgtgccccagagcagaagctgagcctgggctgtgtccatggtagaggaaatgctccctccattgggaacagcgtggccggcttctgggcttggggaaggagagggagaattctgggcgggcgatagaggggcccaggttccctctggtcatgaccttgaagttgcccaggtgaccaggaaggaggagggtgctcctctctgtcaagaagatctgagcttctcttccctagaatcagctactcttctatccccctaaaaatgtacaggaattttgcacgttgaatgaatggatagtttactaaccagtttgggaagaattgacacctttcaatccatgaatatcctctgtctttcccattagtatactttaataattctcaagaaagttgtacaattttccccataaacagcttggacatctctgtagatgaacccctagtttactgatatacatttgttgtgagtttttgcagggagcgggtcgggggaggtgtttgtttcggttttgtttagagacagggtctggctctgtcacccaggctggagtgcagcggcacagttttggctcactgctgcctcaaattcctgagatcaagtgatcctcccacctcagcctcctgagtagctgggactacaggcatgcaccaccatgcctggctaatttttaatttgaaattgttttggtagagacagaatcttgctatgttttccaggctggtctcaaactcctgggctcaaacaatccacccgcctcagcctgccaaagtgctgggattacaggtgtgagccactgtgcccagtccaactgatatttttaatgtgattgtaaattgtatccctctttaatattattttccattcatctgctgatgtacaaaaatatattaaataataggcttatatatttgaaatcagatctggtaaatttgctacactttctcatagttctaaaagtgtatctgtgcagtctgtaggatttgctgcacatttaaacatgtcatctgtgaatggtgacaattttgttgccatcttctcaattcctacacctttcatttttttctttcaccttactctccctgctggtattcagtacaatgcggcatccttgtcttgtcacaaaggatgtttatatacagttcactattaaacacgatgcctgctgtaggttccttgcaggagtctctcaccagattaaggaagttattttacatttctcgtatggtaagtagtttctgaaaatcattcttcagattttattcaatgttttttctgcatcttttattgtgatttttttctcctttaatattgcaatttgtcattcttctaatgtcaaaccgattttgcatccttggaatgcatggaccagacttgtccattatgtactagccagcactatatgtggcactactgtgattaaggcatcgtttattcttcagaattgttttattctctggaggatcttgtgtaaggttggaatttcctaccagtgaatctctctgagccagttttggggttgtttttgtttgttttgagacagagtctcgctctttggcccaggctggagtgcagtagcgccatctcagctcactgcaacctccacctcctgggctcaagtgattctcctgcctcagcctctggagtagctgggattacaggctcgtgcaaccacactcagccaatttttgtatttttagtagagaagaggtttcattgtattggccaggctggtcacaaacccctgacctcaagtaatccacccacctcagcctcccaaagtgctggaattacaggcatgagccaccgcaccctgcctaacccagttttgtttgtgggaatatttgtcactatgtattcaatacccttagaagaactgagattttctacttcttcttgagtcaaatatatgtgtttgattagatttttctaagaatactctcatttcatctcaaagtactggcataatgttgttaaaattgactctattacccattttaggtattccacatctataaaacaaccccccgcccccagccctgtttacactcgatatgggtgatttgtgccttctttcttctgtttttattttgttttgttttgttttgatatagagtctcgctctgtcacgtaggctgaagtgcagtggtgcagtggtgcaatcttggctcactgcaacctctgcctccctggttcaagtgattctcctgcctcagcctcccgagtagctgggattacaggcgagtgccaccacacctggcttattttttgtatttttagtagagacagggtttcgccatgttggtcacgctggtcttgaactcctgacctcaagtgatccgcccacctcagcctcccaaagtgctggaattacagacatgagccgccgcacccacccagtcctttcttctgttcttgataaattcaccgaatcagtttcaatttctgtaatattgtaaaggaactaactgccactttcttgctgcatcatcccactgaatatatgatctacttctttaatacttgttcttccctttcttatttccttcaacttttcaagattattttactgcatttttctgagatctatgcatagctcattctttttcagcttattttctataaaatttctatacatattttaaggtaatcaatttccctctatgtactacattagctgtatctcacaaggttttcatgtaatgatttcattattgcttagttcaaaatgtgacctaatttccaatttgagaatctctctaaatcactgggaacatatttcctcatttccaagcatatgaggatgttctagttatatttttgtgactgatttctagtattttgcttacagaacatatgtggaatgttttggtcctttgaaatttgtttaggcttgttttacaggcccacgtatggtccatgtcttagtccatttgggctgttataacaaaatcccataaaatgggtggctcataaacaacagaaatttatttttcatagttctggaggctgagaagtctcagatcaaggcaccagcaggttcagtgtctggtgaggacctgtttcttagttcacagagggtgccttcttgctgtgtccttataagatggaagggaccaggcagctctctgaggcttcttttataagggcactaatcccattcataaggcccctggcctcatgacctagttgcctcccaatggccccacttccctaacaccatcacattaggtttcaacatatgaattctgggaacacaagaattcagaccacagtagtcaatttctgcccgtggtccttttctttttttttcttttcttgtttttttgagacggagtctcactctgttgcccaggctagaatgcagtggcactatctcagctcactgcaagctccgcctcccaggttcaagcgattctcctgcctcagcctcctgagtagctaagattacaggcatgtgccaccatgcctggctgattttttttgtatttttagtagagatagggtttctccatgttggtcaggctggtctcgaactcccaacctcaggtgatccatctgcctcggcctccaaaagtgctgagattgcaggcatgagtcaccgcgcctggccagtccttttctgcttgaagagaatatacatcccataactctggatgcgatgttccatagataagtccattagctcaagtcgattaagtcttctaatcttctgatatcttcttcaagttatttcaggtaatgcttcttggccataaagttttaaaatttgatgtcaacataactataccaatcttccttggagtggaaatttcatggtatctttttagccattctctatcttagcccaccattctggaaataggagctcttctctaaaaggctttcttcatgcatcatttctgaaacgtgcccttatattatgcaagagttgtgtctgttctccttgcatttccaacagtttagtcacatctctgtgatgggatttcttggccttttctgcacagtatctgaggcaggggcagcacagccgggcgcccctcccccatgcttccagagcacacatgtaacatctgttatagaccatgtcagagagccatcctgcaggtcccagaaacatgactcaaatggcctcagacaaagagggagttattgccttgcataactggaaatccagacgtggggcactcagagccgcctgaacccggatgcccagccctgtttctctgggattctctccaccctgtcttcatctccgcattggctggcttccctcatggaggcaaacagctccggcagagcagggcctcaccccatacatgaagccatccaaaggaggaggaggtcgagaccagaatcccaggagatgcagagaggcctattcctgatgaccaagaccagggctgaggcctactggccttcctcagggcaaccaggggcagggtggtgcaggcctcgggcctaggacaggcagatgatcacccccacccccatcctgccaggccagggacaatggagattcctgagcaagcacagctcaagaaccaaccaaaaattccagcaagaagaacacacttggcagaactctggggagatgcagcaggaaccaggtccaaggcctctggtgtaagggtctccccacctgagcatggggtgaggagtccatgctggggacagcacagcatcaggaagttggggctgtgggcagacctgtcctggctctgtctgtttcttggttcacagagggtgccttcttgctgtgtccttataagatggaagggaccaggcagctctctgaggcttcttttataagggcactaatcccattcataaggcccctggcctgacagccaggtccctgctctgtctcctgcctggagtcctgaggacttcccttgtgtccactctcagcctgattttcccacctccttgccaagcatgggcatcccctctgcccctgccctggccctgctgcagctgttacagagggaggagaccatgggatttgggtcataccttggtccaatttcaggtccaatcatttccaccagggatatttggaaagatatgtaacacctttcggggtaatggctacttcaagttcatatgtaccatgttttgttgatttgaggattaaatgaacatgtaggtgaatggcctgtcatgttactgggtacaggatatgggctcagcactggtcaccccttcccttccttttggttcagagacagagcctgtcccctagtccttaagcactgggggctgacctcacatacactgcagatcacccagagatacacaggccagcatccacattaggctgagcccagagggatggagtcacaatcacacaggggaaaaggctgaagaaaagggagggttgggccagatgtgggtggggtggctcacacctgtaatcccaccactttgggaggatgaggagcgagaattacttgaggccaggagtttcagaccagccctggcaacaaagtgagacccacttctctattaaaacaatttttttttaaaaaaatcagccatgcacttgtagtctcagctgcttgggaggctaaggcaggaggatcagctgaacccaagagttcaaagctgcagtgagctatgatcacacccaatgcactccagcctgggcaagagaaaagagagaaaaaagaaaacaagaaagagagcgagagaggaaaggagggagggagggaggaaggtaaagatagagagaaagatagagagagagaaagagagagagagagccagatagattgagagagagagagagttggctttggggcctgaagaaggcaggatacccattacaggacccaatcagagttcctccaccaaagtcacatgattgagcctttttaacaaccagaactcacgggacaatcactatggccacagatgtgcagcctgtgaaagatgagtggctgcaagtcacaccaccagccatgaacacaaagcctggtgggcctttatggctggaggcaagatgtgcctcagtggagtgggccacgtggacgcatctcccaagtcacacacaaggtggccagtgctgaatgggaacagacaatgagaagtctctgcagcaagcctaagctccagtgcaggtgtctcttccacttggaccttataatctggcacattcagtgaaatccagtatctgtggagagactgggggtgccacacggagcatctggcaagcagcagaagaatcaccgtgcagacctctaggacgtgggagcaagtctgcaccctcttctgcaggtgactctgcttcctctgagaaacagcttccgctcaccactgggccttggtggaaactaaatgcctacccataggacaccaggcaagcacccagcctgagcttcccaccatgacctgggtgccctgacccatgcagccaaagcagcaatcaatcaccagaggaaactgcctataagagcccaggctcagtcaggcccagaagggacaagcaagtgtcatgagcaggtggctcagatccctcaacacctgctcctcagactccatccagcctaaggcttcctgggctgttcctcaggaccaactgactgaggaagaaaacacatgagcttgattacagctgggtatgcacaatgtgctgctgatccctgaaggtgaccagctgcagcactactgcaccactcgagctgccctgaatgacacagggaaggttggcttgcccaggggctggagactgatgggggtatttcgctggcaacttggtctggattgagagatggcaaataacacagatgatggtgactcatgaggagttgctagaggtttggctggttggtcagggactcagaaggatcaatgatcagatttgaaaattaatgacaaggaagggtgggaagaggcatagggatgggcccctcattatggacactatgagcagacaccagcattgcatatgaatgctgaccacatggcacatgaacactctctgcagaagaggcctcgataatcaggtggacaaaatgacacattccatagatgtcagtcaacctcattccccagccatcccagtatttgcccagtgggcttgtggacagaggggacagtcatggtggcacacgtagaggctgtgcattacctcatgagcatggctgctatggcttggatgtggtttttcccctccaaaatgcatgttgaaatttagtccccgttgtggcaacgttgggaggtgggacttcatgggagatatttgggtcatgggagcagatccattgtgaatagattaatgcctttcctgggagtgagttattggtctcacaggaatggcttacttccctcgagagcaagttgttaaataagagagtctggcttccttagtttctctctcttgcttcctctccctccatatggtcactttgcctgctccccttccatcttctgccatcagctgaaaaagcctgaggtcctgaccagatgtagctgcccaaccttggaccttccagccaccagaatcataagccaaataaatggcttttatttataaattacccagccttggttattttgttataataacactaaatggcctaaggcagaaaatctccctcttcctaaggttgacctggctaccactgacaaaagtggccaatctgtcaagggcagagaccaacaccaagacccttatatatcattaatgtcgggggccagccagcctcctgctggcagattaattccattgatctcttctaccatggaaggggcacaaattctggatatggatttgccatccctgcttgtaatgcttcttccagcatcaccaaccctggactcctgagatccctggccaccatcgtgtcattccccacagtgctgtgtctaatcagggaactgattccactgcaaaggaaatgcagcatggaattaactgctcttactacatacccatgcccaggcacggccagactaaaagtggagtgacttactgaagactcagttgtggcacgacttgagagatggcaccctgaaatatggaggtcctatcttaagggtacagtctatgctttgactcaagaccatcaagtgacagtgttttaacggtgcctgggatatttttaaatcaggtatggtaagacatgcagacaaggaaatgactggtataaagaaaagatttgttatactcacagatctcaagaaaagggaacaaaccacgccacacagggccacacagagaagcagcagcattggtcaggaggcagaggggagggggagaaaacaggcaagaacctctgttgtggtttccactgggaaggaacaggggaggcaaggtaagcaggtttaggattggctagtttgaataattttggtgggctctggagcacaggaacaactagatacctacttgtctggtacctggtcttggagtgatgagggcaggtggatagcagcccagcctgtgagagcccaggaaagaaagtgcttcagggccgggcgcggtggctcacacctgtaatcccagcactttgggaggccaaggcgggtggatcacaaggtcaggagatcgagaccaccctgactaacatggtgaaaccctgtctctactaaaaatacaaaaaattagctgggcatgatggcgggtgcctgtagtcccagctactcaggaggctgagacaggagaatggcatgaacccaggaggcagagcttgcagtgagccaaggtcgtgccactgcactctagcctgggtgacagagcgagactctgtctcaaaaaaaaaaaaaaaaaagtgcttcagggtatgggttctggattggttggtttgcacaagaaaggctcactgtttgccatctctaagaattagctaaccctgcaaggggcagtgccccagggtcagcaaggccccagatgtcagatcatcagaaaacagaaaataaaagagcatggttaatacacacagtctccccaggagccacagtacatgggtctgagaatagatggatagaagtgagagtggcttcttccacaaataatcctcctaatacgctcaaataaggtttgcttgctatccgaacatttgagctctgctgctttgaagatcttagttcccaagaatataatgcctctcccaggggacaccacaatggctccattgagttggaactaacagtcagaaacgggggcaactttactggaaggactgattggtgctaacgaggggaaattgggctgctgtgtcacatagtgggggcaagaaggacttcacctagaaccccgagtactcatcatcttagtacttctgcctactcagacccttcaagaatgaaggtttagatcttcccaccagataaagatctgtaaccagctgaggttctagctgtggaacagggaaatatcaaatgggtagtggacaaaagaagtcacagatagcatctgtggctcataactagggtttaccaggtttagtaaacgaaaatacagacgtccagtgagatagtaacttcagataaacaacaaatagtattactaaaagtactatttgtatgtcctatgcaatattggggacatatttatgcttaaaaatgcattcactgtttggacatcctatattttatctggtaattctattcatgaccaagtaaaaaagcacatttttttactttgcttgtcatgtgtggtatatgtatgtatttggagttattaaccatttatcttttcttattatgagttgttagcagagtattcagtgaaattgtgactaaagatgaagataaactaatatagttagctgtggatgcagtggctcttgggagcctgcatctcgcttggaggagagggtgagaatttcgttcatataaaggataactgcttcttattagacggaaacagagttgttttttggttcctcagaagttcaaatgtgtgtagaaagataaatacggaagctaagtaggaaagcgggtgaactctgccagttatcagcggaatgttctagctgcaaattgcccctttctcgcaagctctaggaagccggctggtaaacagcgccctcctttgcccgccgctgcaatgttaggctttgccaaaagagagcacctgggggaagctgcgaggccaccgcggcgagaaggtgctttcctgtttccctgctgtcctttctttttattccgcacagaagccatatatatatatatatatatatatatatatatatatatatagtgtacatttatatattaggcttttaggccatatatatatgtgtgtgtatatatgtatatgtatcgctacatatatatactatatatacatatatactatatatactttctacacactataaatagatagtgtggcacatctatatattacacatttaggctctttatagatatgtaccaccacatatatagtgatacatttatatatatatatatatatcgactaaacagcatttaggctgtttccagctttttgctaccacaagtaatgcaggaattagcaaataagatcttccagataatacccagaggcaggactgctggatcaggaggaatgcacattttcagttttactgccctctaatgtggctgatgaatttacaccctactagcaatgtgtgggttctgtttctctaactctttaccacacttgatatcagcagacttttccatttgcaccacgcagctcttactacaaccctcctttacagctctcaactaacccaggcaggcagcatgcgtgggccagacaccagggcagtcctccactgcagttagatattgagtctccctcctgtgactgggcagacgaaaaggacttgttcactcttgttttctctaacacagcgcttcacacacagagttcttttccagttatgtgactaattcaataaactgcctgagccttagtttcccaatccttgtcattaaatggtcactgtgcccactggtgtgctgggaaaagtttaacaactaacagagtagcaagggcggtgggagtcctaatttgtagcatttgcccatttccatggtataaataatcccaccatggctgatttcaagctaccaaggtgccccactgaacacagagttgggaagagatgctcttaaatcatcagctctcctgagctggtgcaagccagttgcgggacaccactgggctttttgcaaccctgtttcttaattctcagttctgggcaggctgtagtcgcctccccgtgcttctgtacaagtagacagcgacatctggtggcaaagtcaagcaaatcccagaccatgtagagaagggcctagagtatgggaaaacaagaaacacccctcttctcccaccagcacccccacgaaaggttcctgtcctcttcctcaaccaaccctgggacccatcaactccagcaaaaactcaatgcctggggagttcctacatgggcagcctgcaggtctcccttcctgtggcagctggggtagagtggcatggctcctggtgttggaataagcagtgacctcgtacagcagtcattcccactgcctgcctgcagaccccttgccttacccctggttgagaattatcagaagcgtccctcaacccaaagcagtcaccacagcactcctagaacaagagttactcagctagtgtgaccagagcactggttcaccatgagcgcttcctcctggaatttggacaaccatctcagggcctttctttggtcaatttccttctgattctgtgtgtaagacttgtgtgcagaatctcagtggcctaaatatctcagcctatggtaggataggcggggaagtgagggtggcccctgcaatagcaaagccattacacttagcctttggccactaaaaccccctatggcagcaacaggctgctgaccaccgaacgttcacctccttttccatagtgtattccttttcttgagacagggtctccctgtatcacccaggctagagagcagcagtgcatccatagctccctgcaatctcagactcctgggctcaagtgatccggatcctaagcttgggtctccctatagtgagtcgtattaatttcgataagccacctcgaggcgaattagcccgcctaatgagcgggctttttttggccgtttcggccgaattctctagagatcttccatacctaccagttctccgcctgcagggggggggggggggggggggggggggggacatgaggttgccccgtattcagtgtcgctgatttgtattgtctgaagttgtttttacgttaagttgatgcagatcaattaatacgatacctgcgtcataattgattatttgacgtggtttgatggcctccacgcacgttgtgatatgtagatgataatcattatcactttacgggtcctttccggtgatccgacaggttacggggcggcgacctcgcgggttttcgctatttatgaaaattttccggtttaaggcgtttccgttcttcttcgtcataacttaatgtttttatttaaaataccctctgaaaagaaaggaaacgacaggtgctgaaagcgaggctttttggcctctgtcgtttcctttctctgtttttgtccgtggaatgaacaatggaagtcctggcgtaatagcgaagaggcccgcaccgatcgcccttcccaacagttgcgcagcctgaatggcgaatggcgcctgatgcggtattttctccttacgcatctgtgcggtatttcacaccgcatatggtgcactctcagtacaatctgctctgatgccgcatagttaagccagccccgacacccgccaacacccgctgacgcgccctgacgggcttgtctgctcccggcatccgcttacagacaagctgtgaccgtctccgggagctgcatgtgtcagaggttttcaccgtcatcaccgaaacgcgcgagacgaaagggcctcgtgatacgcctatttttataggttaatgtcatgataataatggtttcttagacgtcaggtggcacttttcggggaaatgtgcgcggaacccctatttgtttatttttctaaatacattcaaatatgtatccgctcatgagacaataaccctgataaatgcttcaataatattgaaaaaggaagagtatgagtattcaacatttccgtgtcgcccttattcccttttttgcggcattttgccttcctgtttttgctcacccagaaacgctggtgaaagtaaaagatgctgaagatcagttgggtgcacgagtgggttacatcgaactggatctcaacagcggtaagatccttgagagttttcgccccgaagaacgttttccaatgatgagcacttttaaagttctgctatgtggcgcggtattatcccgtattgacgccgggcaagagcaactcggtcgccgcatacactattctcagaatgacttggttgagtactcaccagtcacagaaaagcatcttacggatggcatgacagtaagagaattatgcagtgctgccataaccatgagtgataacactgcggccaacttacttctgacaacgatcggaggaccgaaggagctaaccgcttttttgcacaacatgggggatcatgtaactcgccttgatcgttgggaaccggagctgaatgaagccataccaaacgacgagcgtgacaccacgatgcctgtagcaatggcaacaacgttgcgcaaactattaactggcgaactacttactctagcttcccggcaacaattaatagactggatggaggcggataaagttgcaggaccacttctgcgctcggcccttccggctggctggtttattgctgataaatctggagccggtgagcgtgggtctcgcggtatcattgcagcactggggccagatggtaagccctcccgtatcgtagttatctacacgacggggagtcaggcaactatggatgaacgaaatagacagatcgctgagataggtgcctcactgattaagcattggtaactgtcagaccaagtttactcatatatactttagattgatttaaaacttcatttttaatttaaaaggatctaggtgaagatcctttttgataatctcatgaccaaaatcccttaacgtgagttttcgttccactgagcgtcagaccccgtagaaaagatcaaaggatcttcttgagatcctttttttctgcgcgtaatctgctgcttgcaaacaaaaaaaccaccgctaccagcggtggtttgtttgccggatcaagagctaccaactctttttccgaaggtaactggcttcagcagagcgcagataccaaatactgtccttctagtgtagccgtagttaggccaccacttcaagaactctgtagcaccgcctacatacctcgctctgctaatcctgttaccagtggctgctgccagtggcgataagtcgtgtcttaccgggttggactcaagacgatagttaccggataaggcgcagcggtcgggctgaacggggggttcgtgcacacagcccagcttggagcgaacgacctacaccgaactgagatacctacagcgtgagcattgagaaagcgccacgcttcccgaagggagaaaggcggacaggtatccggtaagcggcagggtcggaacaggagagcgcacgagggagcttccagggggaaacgcctggtatctttatagtcctgtcgggtttcgccacctctgacttgagcgtcgatttttgtgatgctcgtcaggggggcggagcctatggaaaaacgccagcaacgcggcctttttacggttcctggccttttgctggccttttgctcacatgttctttcctgcgttatcccctgattctgtggataaccgtattaccgcctttgagtgagctgataccgctcgccgcagccgaacgaccgagcgcagcgagtcagtgagcgaggaagcggaagagcgcccaatacgcaaaccgcctctccccgcgcgttggccgattcattaatgcaggacatgaggttgccccgtattcagtgtcgctgatttgtattgtctgaagttgtttttacgttaagttgatgcagatcaattaatacgatacctgcgtcataattgattatttgacgtggtttgatggcctccacgcacgttgtgatatgtagatgataatcattatcactttacgggtcctttccggtgatccgacaggttaccgggcggcgacctcgcgggttttcgctatttatgaaaattttccggtttaaggcgtttccgttcttcttcgtcataacttaatgtttttatttaaaataccctctgaaaagaaaggaaacgacaggtgctgaaagcgaggctttttggcctctgtcgtttcctttctctgtttttgtccgtggaatgaacaatggaagtcccccccccccccccccccccccccccctgcagcaatggcaacaacgttgcccggatcgatcggtcgcgcgaattgatccgaccaaagcggccatcgtgcctccccactcctgcagttcgggggcatggatgcgcggatagccgctgctggtttcctggatgccgacggatttgcactgccggtagaactccgcgaggtcgtccagcctcaggcagcagctgaaccaactcgcgaggggatcgagcccggggtgggcgaagaactccagcatgagatccccgcgctggaggatcatccagccggcgtcccggaaaacgattccgaagcccaacctttcatagaaggcggcggtggaatcgaaatctcgtgatggcaggttgggcgtcgcttggtcggtcatttcgaaccccagagtcccgctcagaagaactcgtcaagaaggcgatagaaggcgatgcgctgcgaatcgggagcggcgataccgtaaagcacgaggaagcggtcagcccattcgccgccaagctcttcagcaatatcacgggtagccaacgctatgtcctgatagcggtccgccacacccagccggccacagtcgatgaatccagaaaagcggccattttccaccatgatattcggcaagcaggcatcgccatgggtcacgacgagatcctcgccgtcgggcatgcgcgtatcgatacgtaagtaatcttgagatcgggcgttcgatcgccccgggagatttttttgttttttatgtcttccattcacttcccagacttgcaagttgaaatatttctttcaagggaattgatcctctacgccggacgcatcgtggccggcatcaccggcgccacaggtgcggttgctggcgcctatatcgccgacatcaccgatggggaagatcgggctcgccacttcgggctcatgagcgcttgtttcggcgtgggtatggtggcaggccccgtggccgggggactgttgggcgccatctccttgcatgcaccattccttgcggcggcggtgctcaacggcctcaacctactactgggctgcttcctaatgcaggagtcgcataagggagagcgtcgatcgaccgatgcccttgagagccttcaacccagtcagctccttccggtgggcgcggggcatgactatcgtcgccgcacttatgactgtcttctttatcatgcaactcgtaggacaggtgccggcagcgctctgggtcattttcggcgaggaccgctttcgctggagcgcgacgatgatcggcctgtcgcttgcggtattcggaatcttgcacgccctcgctcaagccttcgtcactggtcccgccaccaaacgtttcggcgagaagcaggccattatcgccggcatggcggccgacgcgctgggctacgtcttgctggcgttcgcgacgcgaggctggatggccttccccattatgattcttctcgcttccggcggcatcgggatgcccgcgttgcaggccatgctgtccaggcaggtagatgacgaccatcagggacagcttcaaggatcgctcgcggctcttaccagcctaacttcgatcactggaccgctgatcgtcacggcgatttatgccgcctcggcgagcacatggaacgggttggcatggattgtaggcgccgccctataccttgtctgcctccccgcgttgcgtcgcggtgcatggagccgggccacctcgacctgaatggaagccggcggcacctcgctaacggattcaccactccaagaattggagccaatcaattcttgcggagaactgtgaatgcgcaaaccaacccttggcagaacatatccatcgcgtccgccatctccagcagccgcacgcggcgcatccccccccccctttcaattcaattcatcattttttttttattcttttttttgatttcggtttctttgaaatttttttgattcggtaatctccgaacagaaggaagaacgaaggaaggagcacagacttagattggtatatatacgcatatgtagtgttgaagaaacatgaaattgcccagtattcttaacccaactgcacagaacaaaaacctgcaggaaacgaagataaatccgcgtatcgatacgtaagtaatcttgagatcgggcgttcgatcgccccgggagatttttttgttttttatgtcttccattcacttcccagacttgcaagttgaaatatttctttcaagggaattgatcctctacgccggacgcatcgtggccggcatcaccggcgccacaggtgcggttgctggcgcctatatcgccgacatcaccgatggggaagatcgggctcgccacttcgggctcatgagcgcttgtttcggcgtgggtatggtggcaggccccgtggccgggggactgttgggcgccatctccttgcatgcaccattccttgcggcggcggtgctcaacggcctcaacctactactgggctgcttcctaatgcaggagtcgcataagggagagcgtcgatcgaccgatgcccttgagagccttcaacccagtcagctccttccggtgggcgcggggcatgactatcgtcgccgcacttatgactgtcttctttatcatgcaactcgtaggacaggtgccggcagcgctctgggtcattttcggcgaggaccgctttcgctggagcgcgacgatgatcggcctgtcgcttgcggtattcggaatcttgcacgccctcgctcaagccttcgtcactggtcccgccaccaaacgtttcggcgagaagcaggccattatcgccggcatggcggccgacgcgctgggctacgtcttgctggcgttcgcgacgcgaggctggatggccttccccattatgattcttctcgcttccggcggcatcgggatgcccgcgttgcaggccatgctgtccaggcaggtagatgacgaccatcagggacagcttcaaggatcgctcgcggctcttaccagcctaacttcgatcactggaccgctgatcgtcacggcgatttatgccgcctcggcgagcacatggaacgggttggcatggattgtaggcgccgccctataccttgtctgcctccccgcgttgcgtcgcggtgcatggagccgggccacctcgacctgaatggaagccggcggcacctcgctaacggattcaccactccaagaattggagccaatcaattcttgcggagaactgtgaatgcgcaaaccaacccttggcagaacatatccatcgcgtccgccatctccagcagccgcacgcggcgcatccccccccccctttcaattcaattcatcattttttttttattcttttttttgatttcggtttctttgaaatttttttgattcggtaatctccgaacagaaggaagaacgaaggaaggagcacagacttagattggtatatatacgcatatgtagtgttgaagaaacatgaaattgcccagtattcttaacccaactgcacagaacaaaaacctgcaggaaacgaagataaatccgcgtatcgatacgtaagtaatcttgagatcgggcgttcgatcgccccgggagatttttttgttttttatgtcttccattcacttcccagacttgcaagttgaaatatttctttcaagggaattgatcctctacgccggacgcatcgtggccggcatcaccggcgccacaggtgcggttgctggcgcctatatcgccgacatcaccgatggggaagatcgggctcgccacttcgggctcatgagcgcttgtttcggcgtgggtatggtggcaggccccgtggccgggggactgttgggcgccatctccttgcatgcaccattccttgcggcggcggtgctcaacggcctcaacctactactgggctgcttcctaatgcaggagtcgcataagggagagcgtcgatcgaccgatgcccttgagagccttcaacccagtcagctccttccggtgggcgcggggcatgactatcgtcgccgcacttatgactgtcttctttatcatgcaactcgtaggacaggtgccggcagcgctctgggtcattttcggcgaggaccgctttcgctggagcgcgacgatgatcggcctgtcgcttgcggtattcggaatcttgcacgccctcgctcaagccttcgtcactggtcccgccaccaaacgtttcggcgagaagcaggccattatcgccggcatggcggccgacgcgctgggctacgtcttgctggcgttcgcgacgcgaggctggatggccttccccattatgattcttctcgcttccggcggcatcgggatgcccgcgttgcaggccatgctgtccaggcaggtagatgacgaccatcagggacagcttcaaggatcgctcgcggctcttaccagcctaacttcgatcactggaccgctgatcgtcacggcgatttatgccgcctcggcgagcacatggaacgggttggcatggattgtaggcgccgccctataccttgtctgcctccccgcgttgcgtcgcggtgcatggagccgggccacctcgacctgaatggaagccggcggcacctcgctaacggattcaccactccaagaattggagccaatcaattcttgcggagaactgtgaatgcgcaaaccaacccttggcagaacatatccatcgcgtccgccatctccagcagccgcacgcggcgcatccccccccccctttcaattcaattcatcattttttttttattcttttttttgatttcggtttctttgaaatttttttgattcggtaatctccgaacagaaggaagaacgaaggaaggagcacagacttagattggtatatatacgcatatgtagtgttgaagaaacatgaaattgcccagtattcttaacccaactgcacagaacaaaaacctgcaggaaacgaagataaatcatgtcgaaagctacatataaggaacgtgctgctactcatcctagtcctgttgctgccaagctatttaatatcatgcacgaaaagcaaacaaacttgtgtgcttcattggatgttcgtaccaccaaggaattactggagttagttgaagcattaggtcccaaaatttgtttactaaaaacacatgtggatatcttgactgatttttccatggagggcacagttaagccgctaaaggcattatccgccaagtacaattttttactcttcgaagacagaaaatttgctgacattggtaatacagtcaaattgcagtactctgcgggtgtatacagaatagcagaatgggcagacattacgaatgcacacggtgtggtgatgtcgaaagctacatataaggaacgtgctgctactcatcctagtcctgttgctgccaagctatttaatatcatgcacgaaaagcaaacaaacttgtgtgcttcattggatgttcgtaccaccaaggaattactggagttagttgaagcattaggtcccaaaatttgtttactaaaaacacatgtggatatcttgactgatttttccatggagggcacagttaagccgctaaaggcattatccgccaagtacaattttttactcttcgaagacagaaaatttgctgacattggtaatacagtcaaattgcagtactctgcgggtgtatacagaatagcagaatgggcagacattacgaatgcacacggtgtggtgttgaagacgaaagggcctcgtgatacgcctatttttataggttaatgtcatgataataatggtttcttagacgtcaggtggcacttttcggggaaatgtgcgcggaacccctatttgtttatttttctaaatacattcaaatatgtatccgctcatgagacaataaccctgataaatgcttcaataatattgaaaaaggaagagtatgagtattcaacatttccgtgtcgcccttattcccttttttgcggcattttgccttcctgtttttgctcacccagaaacgctggtgaaagtaaaagatgctgaagatcagttgggtgcacgagtgggttacatcgaactggatctcaacagcggtaagatccttgagagttttcgccccgaagaacgttttccaatgatgagcacttttaaagttctgctatgtggcgcggtattatcccgtgttgacgccgggcaagagcaactcggtcgccgcatacactattctcagaatgacttggttgagtactcaccagtcacagaaaagcatcttacggatggcatgacagtaagagaattatgcagtgctgccataaccatgagtgataacactgcggccaacttacttctgacaacgatcggaggaccgaaggagctaaccgcttttttgcacaacatgggggatcatgtaactcgccttgatcgttgggaaccggagctgaatgaagccataccaaacgacgagcgtgacaccacgatgcctgcagcaatggcaacaacgttgcgcaaactattaactggcgaactacttactctagcttcccggcaacaattaatagactggatggaggcggataaagttgcaggaccacttctgcgctcggcccttccggctggctggtttattgctgataaatctggagccggtgagcgtgggtctcgcggtatcattgcagcactggggccagatggtaagccctcccgtatcgtagttatctacacgacggggagtcaggcaactatggatgaacgaaatagacagatcgctgagataggtgcctcactgattaagcattggtaactgtcagaccaagtttactcatatatactttagattgatttaaaacttcatttttaatttaaaaggatctaggtgaagatcctttttgataatctcatgaccaaaatcccttaacgtgagttttcgttccactgagcgtcagaccccgtagaaaagatcaaaggatcttcttgagatcctttttttctgcgcgtaatctgctgcttgcaaacaaaaaaaccaccgctaccagcggtggtttgtttgccggatcaagagctaccaactctttttccgaaggtaactggcttcagcagagcgcagataccaaatactgtccttctagtgtagccgtagttaggccaccacttcaagaactctgtagcaccgcctacatacctcgctctgctaatcctgttaccagtggctgctgccagtggcgataagtcgtgtcttaccgggttggactcaagacgatagttaccggataaggcgcagcggtcgggctgaacggggggttcgtgcacacagcccagcttggagcgaacgacctacaccgaactgagatacctacagcgtgagctatgagaaagcgccacgcttcccgaagggagaaaggcggacaggtatccggtaagcggcagggtcggaacaggagagcgcacgagggagcttccagggggaaacgcctggtatctttatagtcctgtcgggtttcgccacctctgacttgagcgtcgatttttgtgatgctcgtcaggggggcggagcctatggaaaaacgccagcaacgcggcctttttacggttcctggccttttgctggccttttgctcacatgttctttcctgcgttatcccctgattctgtggataaccgtattaccgcctttgagtgagctgataccgctcgccgcagccgaacgaccgagcgcagcgagtcagtgagcgaggaagcggaagagcgcctgatgcggtattttctccttacgcatctgtgcggtatttcacaccgcatatggtgcactctcagtacaatctgctctgatgccgcatagttaagccagtatacactccgctatcgctacgtgactgggtcatggctgcgccccgacacccgccaacacccgctgacgcgccctgacgggcttgtctgctcccggcatccgcttacagacaagctgtgaccgtctccgggagctgcatgtgtcagaggttttcaccgtcatcaccgaaacgcgcgaggcagctgtggaatgtgtgtcagttagggtgtggaaagtccccaggctccccagcaggcagaagtatgcaaagcatgcatctcaattagtcagcaaccaggtgtggaaagtccccaggctccccagcaggcagaagtatgcaaagcatgcatctcaattagtcagcaaccatagtcccgcccctaactccgcccatcccgcccctaactccgcccagttccgcccattctccgccccatggctgactaattttttttatttatgcagaggccgaggccgcctcggcctctgagctattccagaagtagtgaggaggcttttttggaggcctaggcttttgcaaaaagcttcacgctgccgcaagcactcagggcgcaagggctgctaaaggaagcggaacacgtagaaagccagtccgcagaaacggtgctgaccccggatgaatgtcagctactgggctatctggacaagggaaaacgcaagcgcaaagagaaagcaggtagcttgcagtgggcttacatggcgatagctagactgggcggttttatggacagcaagcgaaccggaattgccagctggggcgccctctggtaaggttgggaagccctgcaaagtaaactggatggctttcttgccgccaaggatctgatggcgcaggggatcaagatctgatcaagagacaggatgaggatcgtttcgcatgattgaacaagatggattgcacgcaggttctccggccgcttgggtggagaggctattcggctatgactgggcacaacagacaatcggctgctctgatgccgccgtgttccggctgtcagcgcaggggcgcccggttctttttgtcaagaccgacctgtccggtgccctgaatgaactgcaggacgaggcagcgcggctatcgtggctggccacgacgggcgttccttgcgcagctgtgctcgacgttgtcactgaagcgggaagggactggctgctattgggcgaagtgccggggcaggatctcctgtcatctcaccttgctcctgccgagaaagtatccatcatggctgatgcaatgcggcggctgcatacgcttgatccggctacctgcccattcgaccaccaagcgaaacatcgcatcgagcgagcacgtactcggatggaagccggtcttgtcgatcaggatgatctggacgaagagcatcaggggctcgcgccagccgaactgttcgccaggctcaaggcgcgcatgcccgacggcgaggatctcgtcgtgacccatggcgatgcctgcttgccgaatatcatggtggaaaatggccgcttttctggattcatcgactgtggccggctgggtgtggcggaccgctatcaggacatagcgttggctacccgtgatattgctgaagagcttggcggcgaatgggctgaccgcttcctcgtgctttacggtatcgccgctcccgattcgcagcgcatcgccttctatcgccttcttgacgagttcttctgagcgggactctggggttcgaaatgaccgaccaagcgacgcccaacctgccatcacgagatttcgattccaccgccgccttctatgaaaggttgggcttcggaatcgttttccgggacgccggctggatgatcctccagcgcggggatctcatgctggagttcttcgcccaccccgggctcgatcccctcgcgagttggttcagctgctgcctgaggctggacgacctcgcggagttctaccggcagtgcaaatccgtcggcatccaggaaaccagcagcggctatccgcgcatccatgcccccgaactgcaggagtggggaggcacgatggccgctttggtcccggatctttgtgaaggaaccttacttctgtggtgtgacataattggacaaactacctacagagatttaaagctctaaggtaaatataaaatttttaagtgtataatgtgttaaactactgattctaattgtttgtgtattttagattccaacctatggaactgatgaatgggagcagtggtggaatgcctttaatgaggaaaacctgttttgctcagaagaaatgccatctagtgatgatgaggctactgctgactctcaacattctactcctccaaaaaagaagagaaaggtagaagaccccaaggactttccttcagaattgctaagttttttgagtcatgctgtgtttagtaatagaactcttgcttgctttgctatttacaccacaaaggaaaaagctgcactgctatacaagaaaattatggaaaaatattctgtaacctttataagtaggcataacagttataatcataacatactgttttttcttactccacacaggcatagagtgtctgctattaataactatgctcaaaaattgtgtacctttagctttttaatttgtaaaggggttaataaggaatatttgatgtatagtgccttgactagagatcataatcagccataccacatttgtagaggttttacttgctttaaaaaacctcccacacctccccctgaacctgaaacataaaatgaatgcaattgttgttgttaacttgtttattgcagcttataatggttacaaataaagcaatagcatcacaaatttcacaaataaagcatttttttcactgcattctagttgtggtttgtccaaactcatcaatgtatcttatcatgtctggaagatcttatgtatgaaattcttaaaaaaggacacctgtaagcgttgatttctatgtatgaagtccacatttgatgtaatcataacaaagcctaaaaaataggtatatcattttataattatttgctgtacaagtatatcaataaacttatatattacttgttttctagataagcttcgtaaccgacagtttctaacttttgtgctttgacaagaacttcttcttcttgctttaataaaaactgttccattttcgttgtataacttgaatcataagcgccaagcagtctgacagccaacagcgcagcgttcgtactattattaatagcgacggtagctactggaacacctctaggcatttgcacaattgaatgtaaagaatctactccatctagacaagaaccttttacgggcacaccgatgacaggaagtggtgtcattgcagccaccatacctggcaagtgagcagccccaccagctccagcgataattgttttaattccacgcttgcttgcggaaatagcatatgctgacatcctatgtggagttctatgagcagagactattgtcacttcaaatggaacgccaaaatcttttaaaaccgcacatgcggcagacattaccggcaagtcagagtctgatcccatgatgattccaaccaatggtttgaccattgcttccaagtccaacttttgagcgacagagattttgattggaatatcagttctacctgtaatgtagttcagcctttgttcacattccgccatactggaggcaataatatttatgtgacctacttttctgttaggtctagactcttttccatataagtacactgaggaacctggagtcgccaatgctctttcgcaagtttctagctctttatcttttgtatgtttgtctccaagaacatttagcataatggcgttcgttgtaatggtggagaaagatgtgaaattctttggcattggcaaatccaatattgatctcaaatgagcttcaaattgagaagtgacgcaagcatcaatggtataatgtccagagttgtgaggccttggggactgtgtgccgaacatgctccttcactattttaacatgtggaattaattctaaatcctctttatatgatctgccgatagatagttctaagtcattgaggttcatcaacaattggattttctgtttactcgacttcaggtaaatgaaatgagatgatacttgcttatctcatagttaactctaagaggtgatacttatttactgtaaaactgtgacgataaaaccggaaggaagaataagaaaactcgaactgatctataatgcctattttctgtaaagagtttaagctatgaaagcctcggcattttggccgctcctaggtagtgctttttttccaaggacaaaacagtttctttttcttgagcaggttttatgtttcggtaatcataaacaataaataaattatttcatttatgtttaaaaataaaaaataaaaaagtattttaaatttttaaaaaagttgattataagcatgtgaccttttgcaagcaattaaattttgcaatttgtgattttaggcaaaagttacaatttctggctcgtgtaatatatgtatgctaaagtgaacttttacaaagtcgatatggacttagtcaaaagaaattttcttaaaaatatatagcactagccaatttagcacttctttatgagatatattatagactttattaagccagatttgtgtattatatgtatttacccggcgaatcatggacatacattctgaaataggtaatattctctatggtgagacagcatagataacctaggatacaagttaaaagctagtactgttttgcagtaatttttttcttttttataagaatgttaccacctaaataagttataaagtcaatagttaagtttgatatttgattgtaaaataccgtaatatatttgcatgatcaaaaggctcaatgttgactagccagcatgtcaaccactatattgatcaccgatatatggacttccacaccaactagtaatatgacaataaattcaagatattcttcatgagaatggcccagattctcatgtttgacagcttatcatcgcgataagctttaatgcggtagtttatcacagttaaattgctaacgcagtcaggcaccgtgtatgaaatctaacaatgcgctcatcgtcatcctcggcaccgtcaccctggatgctgtaggcataggcttggttatgccggtactgccgggcctcttgcgggatatcgtccattccgacagcatcgccagtcactatggcgtgctgctagcgctatatgcgttgatgcaatttctatgcgcacccgttctcggagcactgtccgaccgctttggccgccgcccagtcctgctcgcttcgctacttggagccactatcgactacgcgatcatggcgaccacacccgtcctgtggatcaattccctttagtataaatttcactctgaaccatcttggaaggaccggtaattatttcaaatctctttttcaattgtatatgtgttatgttatgtagtatactctttcttcaacaattaaatactctcggtagccaagttggtttaaggcgcaagactttaatttatcactacctacgcggccgcggactatggcgcgccatcgttgcgatcgctatacacgcgtatcgataagcttgaagttcctattctctagaaagtataggaacttcagcttgatatcgaattcctgcagcccctttacctctatatcgtgttcgtgcgtatttcttcctctataatatgaaaagaaaggcagtagtcttgattttctattcttccaaatattacaagaatacccagaaccacaagaagcagaagaaactaactgctttatatacttaatttcccgccacaagctcatcgcccagaagtttttttcagtttttcacctgacaatctggcagctcgctgaaaaattttcacctggggttgcctgctacgtaaagtgatcacgtttatgaatggcacattatatagtggcccagacggtctgatggtagttcatgtagttaagaataaatactctgtttgtgtgatttctatgtgtacgttatatatataaatattgttgatggtggtagctgtgggttgtgttcgggggatctttattcctttgccctcggacgagtgctggggcgtcggtttccactatcggcgagtacttctacacagccatcggtccagacggccgcgcttctgcgggcgatttgtgtacgcccgacagtcccggctccggatcggacgattgcgtcgcatcgaccctgcgcccaagctgcatcatcgaaattgccgtcaaccaagctctgatagagttggtcaagaccaatgcggagcatatacgcccggagccgcggcgatcctgcaagctccggatgcctccgctcgaagtagcgcgtctgctgctccatacaagccaaccacggcctccagaagaagatgttggcgacctcgtattgggaatccccgaacatcgcctcgctccagtcaatgaccgctgttatgcggccattgtccgtcaggacattgttggagccgaaatccgcgtgcacgaggtgccggacttcggggcagtcctcggcccaaagcatcagctcatcgagagcctgcgcgacggacgcactgacggtgtcgtccatcacagtttgccagtgatacacatggggatcagcaatcgcgcatatgaaatcacgccatgtagtgtattgaccgattccttgcggtccgaatgggccgaacccgctcgtctggctaagatcggccgcagcgatcgcatccatggcctccgcgaccggctgcagaacagcgggcagttcggtttcaggcaggtcttgcaacgtgacaccctgtgcacggcgggagatgcaataggtcaggctctcgctgaattccccaatgtcaagcacttccggaatcgggagcgcggccgatgcaaagtgccgataaacataacgatctttgtagaaaccatcggcgcagctatttacccgcaggacatatccacgccctcctacatcgaagctgaaagcacgagattcttcgccctccgagagctgcatcaggtcggagacgctgtcgaacttttcgatcagaaacttctcgacagacgtcgcggtgagttcaggctttttacccatagatccactagatgttttatatttgttgtaaaaagtagataattacttccttgatgatctgtaaaaaagagaaaaagaaagcatctaagaacttgaaaaactacgaattagaaaagaccaaatatgtatttcttgcattgaccaatttatgcaagtttatatatatgtaaatgtaagtttcacgaggttctactaaactaaaccacccccttggttagaagaaaagagtgtgtgagaacaggctgttgttgtcacacgattcggacaattctgtttgaaagagagagagtaacagtacgatcgaacgaactttgctctggagatcacagtgggcatcatagcatgtggtactaaaccctttcccgccattccagaaccttcgattgcttgttacaaaacctgtgagccgtcgctaggaccttgttgtgtgacgaaattggaagctgcaatcaataggaagacaggaagtcgagcgtgtctgggttttttcagttttgttctttttgcaaacaaatcacgagcgacggtaatttctttctcgataagaggccacgtgctt

SEQ ID NO: 8 - DNA, 172334 bp, synthetic construct
  misc_feature 1..172334: note = BAC6
  source 1..172334: mol_type = other DNA
atcgctgcggccgatcttagccagacgagcgggttcggcccattcggaccgcaaggaatcggtcaatacactacatggcgtgatttcatatgcgcgattgctgatccccatgtgtatcactggcaaactgtgatggacgacaccgtcagtgcgtccgtcgcgcaggctctcgatgagctgatgctttgggccgaggactgccccgaagtccggcacctcgtgcacgcggatttcggctccaacaatgtcctgacggacaatggccgcataacagcggtcattgactggagcgaggcgatgttcggggattcccaatacgaggtcgccaacatcttcttctggaggccgtggttggcttgtatggagcagcagacgcgctacttcgagcggaggcatccggagcttgcaggatcgccgcggctccgggcgtatatgctccgcattggtcttgaccaactctatcagagcttggttgacggcaatttcgatgatgcagcttgggcgcagggtcgatgcgacgcaatcgtccgatccggagccgggactgtcgggcgtacacaaatcgcccgcagaagcgcggccgtctggaccgatggctgtgtagaagtactcgccgatagtggaaaccgacgccccagcactcgtccgagggcaaaggaataaagatcccccgaacacaacccacagctaccaccatcaacaatatttatatatataacgtacacatagaaatcacacaaacagagtatttattcttaactacatgaactaccatcagaccgtctgggccactatataatgtgccattcataaacgtgatcactttacgtagcaggcaaccccaggtgaaaatttttcagcgagctgccagattgtcaggtgaaaaactgaaaaaaacttctgggcgatgagcttgtggcgggaaattaagtatataaagcagttagtttcttctgcttcttgtggttctgggtattcttgtaatatttggaagaatagaaaatcaagactactgcctttcttttcatattatagaggaagaaatacgcacgaacacgatatagaggtaaagggggagtctggcaacccttcttgccactcatgtcccagctctcaccatgtgacatagcctgttccccctttgccttccatcatgattgtaaagtagatcctggtgccatgcttctcacacagccttcagaactgtaagccaaatgtgcctcttttctttgtaaatcacttggcctcaggtattaatttataggaatgcaaaagagactaacacaccgtccaaagcattacacagattcaactctatttttatcaaatgaccaatataattgattacatatttagaaaaaaaatactaaaattcctatagaatcaaaaaagagtctgaatagcaaaagcaatcctaagcaaaaagaccgaagctggaagcaccacattctctgacctcaaattatactacatgaatataataagaaagacagcatgctactagtagaaaaaaatagcccagaaagaaagccaaatatctaaaaccaactgttgtttgacaaaactgacaaaaatatacactggagaaacaaccctctattcaataagtggtgccgggaaaattaggtggcttatgtggaagaatagaactagacttccatatcaccgtagacacaaattaactgaatatggattcagtgtttaaatttataaactaaaactataaaaatacttgaataaaatctaaaaagagtcctctggacattggtctaagcaaacaatatatgactaagacttcaaaagcaaatgcaataaaaacagaagtagacaaacaggatttagttgaactaaaggtcttctgcacagcaaaagaaataaccaacatggtgaccagacaatctgcaaatggaaaaaatatctggaatctattcatcttgcaaagggctaatatatagaatctacaagtaactcaaataagtcaactaaaaattacaaataacttcattaaagaatagacataaacagacatttatcaaaagaatacacagaagtggccaacacaaataagaaaatatactcagcatcaccaatcatctgataaatgtaaattagaaacaacatgatacggcatcttccaccagtcagaatggctgttattacaaataaaaacagcaggtgtttgcagacaaacataggaaaaataatgatttatatatgcttggtgagaatgtaaattagtacaacctccatgaaaaacaacatagaaatttctcaaagaactaaaattagaattaccatttcttccagtaagctgtcccagtaggcatgttcctcccaaacttttatatcagagaatgttgcctgcactcatatgtttatttcaacaccattttcaatagaaaagtcaaataatctaagtgtcaatcagtggatgattagataaaatatgatatatgtaaatcatggaatactatgcagccagtatggtatgaattcagtgtgaccagcccctggacaagggcttgagtggatgggatggatcatcacctacactgggaacccaacatataccaacggcttcacaggacggtttctattctccatggacacctctgtcagcatggcgtatctgcagatcagcagcctaaaggctgaggacacggccgtgtatgactgtatgagagacacagtgtggaaacccacatcccgagggagtcagaaaccccgagggaggaggcagctgtgctgagctgaggcagtggtgcagcagtttctttaacttccatatgatctcattttgcatcatcttctacttttatattagctaagaacttggggtagacaggtgctcctaagagatccttaacttgcccattttgatgggttttccagaagacgtgagaagccactttgttagcaaagcatcccaaatccatgccctgttctagatacatgtgagcccatttcctggtctttgcttaactgacaagctctcatcagtgcacctgggctaatttcacatcaggtagaggaacgcgttataaaggaaagctaatgttgtaatagcaattcctgcttaaaaaccttcagcttcattgtttttgtgtaatccatcagcaaattatgttagttcaaggttctcaatgggagtttctaataaatagaaaggatgtataaagcttcccctaattaaaatgaaacaattgtgaacacaacctcggtattcagccatgtctccacccttcacacccttcgccacaaaggaattttcacctctcctggaagctgggttcattttcaaattagttatttttttcaatgtaatatctcaagattatcgtatatgactattttagcagaaagtgaattatgggaacttgaactaaacaactgaaaacaaattcacaactaattaaacaagatgccagaatgtgattggctccaggctttgtaattcagcagttcatgtacccagactggaaatttacatgtcttcttgttaccttcacagcacagtcaactcccattatgtaagaaatggtgactgcattcccaagggttatgcatagatatgaaaatagactgggtaaggtgaggagttgattgtttaaattcccctctgaagaagcagcatcaactcaacaaaccacctctcttcactctgtgactagagctatgtcacaggccacatggacctaaatccttgatggatataacatgactacataaattgggctgatcatttttatgctataaaattaatagatgacactgcactccagcctgcacaaccaagcaagtcttcatctgtaaaatctaaaaaagaaaaattaataggtactgacttcgaaatttttgataataatattttcaccacccaaatttaatcacacccacatgttacctgcatcttcactgaaaagttcccagtcacgatgagttccttcaatgctccatgtgttcaaatctggacatcaagagagtccagagaataaaacacaatgacggcagtgaaactgatatatattcagcacctcttaactcaggaggactccatacaccctggcacacagctgcttttctaaatggctcacaatgactccagctcactcacagagctcagacagaaacctcccttcagggtgggagctgggtggcagggggcactcagtacccgcagaggtgaaaatgagctttcagatggaacttccctgtcacctcaacatggaatttattgtttcatttcattacctctctttccataatggttcatttcttttggcctgttcattactgatatttttcagagcaatctcacttgaatctttactcttttgcattttgtctccttgacaatgttgggaagttttacctccagcatcataacatgatctagtgatctgacacattgtgcaaacaatacctacaaattcagaacctctttgtttttctttccacaaaatataattctttctgttctgtgtatgagcatgtcttagcaaccctgtacacacccacatagatgtctacaagcctatgaattgttctctgtaaataaaaatttatctcaaattccttcaatgttcataattctgagagtgaggaaggtccttctcaatctgttcaaacaaaatgcccagagaccatccagtaggtaaggagttcacctggctctggtgtggggtctgtctctttccctctgttgtcccacaggtcagcccagttgttcacgtcctaacaagaaagcccaggtttgtcctgattttaaaacacatcaaacttctgatgactctcctgttacccacatccatggagatagattatttattatataattcagcaaactaatgtcaaatgcccaagttgcaataccgcacatcctagggtatgttcatgcaattcaatggaggagaaaatctttcagagacagatggatctgaaatgataaatatgtgggtaaggactctgggcttgagtatcattgtccagccatgtttcacaagtgtgtcctgtcagggaaggatcagagttccttgtgctctcagagggaaggggtcacagagttcctctctggttcccaggaaaggtaatcgcactaatcttcatgatcttcatgagactatcctccagtgctgacctgttacggagtttttgtctgaagttctcactgcaatccccaatctacatattttcaatcagaagtgtttagaggccaggacacatcttcaaggtcacacattgagaagtatggagatatgtcccactaccttctcctacgatctcagacagaatcccaaatttcaaaaggacacagaaggacagctctcaggtgcttttaaaaaatgacccacttccagggacagtgagcttccctgtaaccatggtggatgttctgaactacaataaacattggatggatccagtattgtttgaagtcactgtcattattacattcagctgttgtttcaatgtgtctgaaagggtaaatgactatttagatggcctgggtgtgtggttggttttatatgaatctttaagggttgaacagtactgaccctattccaaaatctgtccttgatccaggatcacactcatctctcagaccagctccttcagcacatctctttacctggaagaagaggactctgggcttggagaggggaggccccaagaagagaactgagttctcaaagggcacagccagcattctcctcccagggtgagctcaaaagactggcgcctctctcatcccttttcactgctccgtacaaacgcaccacccccatgcaaatcctcacttaggcgcccacaggaagccaccacacatttccttaaattcaggtccaactcataagggaaatgctttctgagagtcatggatctcatgtgcaagaaaatgaagcacctgtggttcttcctcctgctggtggcggctcccagatgtgagtgtttctaggatgcagacatggagatatgggaggctgcctctgatcccagggctcactgtgggtttttctgttcacaggggtcctgtcccagctgcagctgcaggagtcgggcccaggactggtgaagccttcggagaccctgtccctcacctgcactgtctctggtggctccatcagcagtagtagttactactggggctggatccgccagcccccagggaaggggctggagtggattgggagtatctattatagtgggagcacctactacaacccgtccctcaagagtcgagtcaccatatccgtagacacgtccaagaaccagttctccctgaagctgagctctgtgaccgccgcagacacggctgtgtattactgtgcgagacacacagtgaggggaggtgagtgtgagcccagacaaaaacctccctgcagggaggctgagggggcgggcgcaggtgcagctcagggccagcagggggcgtgcggagctcacggaatacaaggccgggtcaggagcaggtgcagggtgagcggggcttgctcatcttctcagtcgtctccctcctcgccagcacctcagctttccgtagaggtcctctttctttattgtgtgtggttctacttcctcacatccttgtgccaggaaagaaaggagtaaggcaaattttcctgttacaattgaagtttcaccaattactaagaactttcctgcaagtacctgcacagcccattataccttatttatatatgtatatattctaatgcttctcaccatctcttgatttgtgtcatcaatttaattgtgccctttttgaaattcatatgctgaaactttaaatccaatggatctatatcggaattttaatggtataattaatgttaaatgtggtcataaatgagaccctaatgcaatagagctgttgtctttataagaagaggaagagacaccagatacctctcacttctcacatgcactcagagaagaggccacgtggagacatagtgcactagaaggtgggcctctgcaagccaggaagaagccgcaccaagaaccaaccctgccagcaccttgatcttctacattcagactgcagaattgtaagaaaatcaatatttgttgtttaagccacccactccttttgtcttcttacgaagacccagacaggctaataccacacaactctgttagctccgtctcctggagggagaagcagccccctgaagctgggcacatcgctcagattttcacatgaattaggcaaaaacagtagctctcatataaaaactgtcacgtccctgttgggacaaggtcttttaaacaagccctggggctttgtcacaaatgttgcattttatcctttattaggacttaactaattgacaatgagtaccagctggatggaaactgaccactgaccatcttctgctgtctccttattatatcacagaaaaccacagcaacattactctatgtcttcaactttctaaatttgtactgaatctattgctaaatgaggagctacatggggtctgagttttgttaccttcttcccagtcttccccaattaccaagcatagaagatactttcagtgaaatttagctgtcaatgcccccgacaccacatcatgttttaaggtccaaggactttctttggggggctattgaaaaacacttttgaatggaaaatcctaaagcatacaacagctgaaagaatggcccctgtgcacatgaaggctgaagggatggatgatagggtacgttcctccaaggtgttcctgggcatgtgatggttggatacctcatgcatacgaaaacaaggactgaactgagatagaaacaagggccatatcctataggaaaacaagaaaaaaacgggcatccctgaagagagttaattagacttggtgggtttaagatgaatttttttccaaagttttttaatgttctaagctaaatatgaatattttcaataaactgcaaattaaaaggagaatgaatttagaagtttagacagaaaaaagccatgagggtgtagaaagcaaatccacacaaaactgtcacatggcagaggccagaatggagctgatgcagctacatcattattctgcagacctagttgagaccctttggtgtttaaggcaggtccagcagtgaagaactcctttattttttgtctggcaaagttctaatctaatcttcatttctgaaaaggatttacatggtaaagattcgtcttggcaggttttatttatttttagtcccccccaacccacgtcaatttgagtaaagtcatgtgttacgtaacaatgctgcagtcaacagtagaccacatatatgtttgtggccacataatgttgtaataccatattttcactaaactttttccatgttttgatgtgtttagatagagagatacttaccatggtgtttccatttcctgcagtgttcagtgcagtaacacgctgtacaggttagttgtctgggaaccctgcgctaatccacataccctgtgtgtagtagggtattccttgtaggtttgtgaaaattcacccttgatgcttgcacaatgatgaaattgcccagggacacatttctcaaaaagaacctctgtcaataaaccacacaccattgaatacaatccctgtgccttctgaactgaaaaccttctgctgagaaatctgttccttttctttctgttttctaaagcctcttttatttccagcaatgtggttttaaactgtgtcacattttttgtcattgggtttatcttacgtaaaatttatagagcttcttcattgtggatgaatatttgcttcccttctccaaatttggaaatattttttgctattattttgaataatttatctcttctctctctctctctctctctctctctctctctctccctctctctctctctctctctctctctctctctctctctctctctctctccccctctctcccttcactaccccttttgtcttgtctttgtataactcctcaaatgcgtagttgagtgtttagtgtctttcctggcccataagtcttgaactcttttttatttctttcacttaaatttttcttctctgtctctactatttcaaatgatctttctttgagtttactgtttcttctattacttgatctagtttggtctaaaatcttgttaaaatttttggctgtattcttcaggatcaatatttttgtttagtcatcttttaaatgttttatctttattaaaattctcacattgttcttgcatgctgccactagctcattgaacatgtttctaacatttactttaaagtttctgtcaggtaatccatgttcttccttttcattgatgtcagtttatggaccttttggttgttcttctgtttggaccatgttcccctgcttcttcattttccttgactgtctttgttgttatctgttctttataacaaaagccatcatatacttcttcaaagactaggctcatagagatcaccctcaccaatcagcccagacagtaattgtgggtctctcaaaacttgataggattcaaacttctgtctgttcttagtggcccctaggttttagaggatgatagattgtgccaggactcacaggtaagggaggtagaaactatgtactcatgaccatggggtctgtgctgatctgagcttctcttgtcatcactctcaatattcaacttccccgtggatcaggctcagctgtggctgctccacgtggggctgttctcagtctgttgcctctgtgtgtgcagaagtcctctgtgaagttaactagtggagtcagacaggaaaatactacagaccaagaattctcagactgttctgcaaagcccctggattcactgaaaaaagaacaagtttggtccagcaggattcatggcaagtgttggtgagggagataacagtaattcaagtggaagttctcaatgggactcgccttcagtacaaagaagattaacagtcctcagagacactgttcagaagattctcttttaagataataaaactgagagcccaagacaagtctgtgtattactgtgagggacacagtgtggggacatctatgtgagcacagacacaaaagtccctgcagggagacaggaggggactgcatgttagttgctgctcagaaccaccagggggcattcaggacaccagtaggcactcagaaccaccaaggagagctcagaatcaccagggggcactcaggaaactggcaggtgctcagaaccaccaaggggcgctcaagatcccagcgggagctcataaccaccagggggcgctcaggacactagggggctcagaaccactagggggcgcccaggaccaccaggtctctcaagacaggagggcgcactcaggacactagggggcgctcagaaccatcagggggcaatcaggacaccagagggacttcagaaccaccagggggcgctgagaaccaccagggggtgctcaggacatgaccggccctcaggaccaccaggggatgttcagaacaccaggaagcactcaggacaccagagagcgatcagaacaccagggggcactcagatcctccagggggcactcaggacaacagggagctctcaggacaccagggtgagctcagtaaaccagtgttcgctcagaaccaccagggagcactgaggacaccaccgctcccttaggaggcagctccacatcaggtccctggatccgggcagggagggcggttccttttggatcttgccactaaccttttgggagttttcctgcttcctttgtggtttcaagaatcatttgcagattcttctcatgtacaaagctctgctttcttggattatgtaatgtttttggctttggatgctaccagaattacgttgtactgtgagaggattcattcgtggtgtgtgcaatagtgaatgaaagctccaatgttaggggtggctttgaaagctacgttaggggtggctgagggcagttagcagaaaatgatcatcactatagaaggctactcatttctttgcacatttgcataaacaattgtagtttatgccctaaaaactgcatgttttcttggccctttttcttaaatggctccactctaagtccagtaatctaattaagctgtgtttcaaagaccaccaatcaagttaattctgtttaatgcaacactttgtaaagaaaatgtacatctgttttttagagtcagctttaaattttacattactttacaaatattgatttgtcaaatttagtctcataactatcttcagtaatttaaaatcttagtcatgtcatgttaaattaagtaatcctaggtttctcacttgaattagggttactaagaattagaatagtaaaagagtataattagcttttggtgaggtttataaagaaagatgaggatttttttttttttttgcttaaaaatattctgttttccagtttacagggcttttcaactggttttaagataaccactgtttacatctaaacttttttttgtaaatgactgctgagtttctatacatattccatagctagagtttcaaagtaaaagctctagtatctttgtattagtgtgtgtatgcgtagatgtgttaatatgtgcatgtatatatatgtgtgtgtgtgtgtgtgtgtgtgtgtgtgtgtgtgtgttgtggctactaggtacaaaattggctttgaaataaatattttcaaattaagtaaatgagcccaatgcatttgaagtacatgtgacttaaataaatatttaataaataagttggctttaaaattattggtaaaaacaaattagagatattttaacaattatcagcataccttatagtttatattaattcatcaagtgattttatatttaaaatcacagctagatattatatggtgtcaaaattttttatgatgattataaaattattaacctcgttggccatatgcggtggctcacacctgtaatcccagctctttggaaggctgaggtgggtggatcacgaggtgaggagattgagaccatcctggctaacatggtgaaaccccatctctactaaaaatacaaaaagaaaaaaaaaattagctgggcatgctggcaggcgcctgtaatcccagctactctggaggctgaggcaggagaatgcttgaaccccagaggtggagcttgcagtgagctgagatcgcaccactgtactgcagcctggatgacagagcgagactccgtctcaaaaaaaaaaattataaacctcattaaaaccagaatgatctttgtaattttttgacaaatatgatgtttaatattgttgttttaataaaaaacaggtaaatagttattagaaaaacaattatttgcttaattataaggtttttactcaggcaagcacctgaaattcatgggttataacatggttaacagagaaaaaactttaaaggatgaattacaattttcataagtaatctagataagctacttaaataaaatagggaaatgtaatcaaataaaccttttaaataaacttgttctacaatttaaaaatctaaagtttaattaaataatagatattgactaaatgtttaggtcattactaattgttttaaaaaatatataagaaaatatttttcttaaaaaattattcttagaaaaataatgtaattcaaagttatttatataacatcataaaaagtaagagagttttaaagaaatttattgacatagagaagtacttttggtaagaaaggttaaaataaaaaaattttatatgagaaataatcttgcatggtaattttttatcctaaaataaaatgactaagaaagaatgacgtttagaataaaacaagatgttcaactatgccataaatggtttgtgtaagtgaaaataagatttataaaaagttaatttattaaaaaaccttcatattatcaagttgactataattgaaagggaagtatttataatagtctttatagagatctggcttttatataaaatatagtaatacactgaagactggttagaatgacaaaattgtcttaaagtgttgatttactaaataaaattataagatattttaattttttaacccccaaatttaacttttattgcatcttgccattttgattttttccctttgagaagacttgagaggctctccattttttcatcacgtcctttaacattttttttcttacagcgattagcttcttactgacttaacttctaactgttgttagcttttaactgctattattgtctgatgctaaaaacattttatctttaagttctaaataaaatgttttctttcaatataacattctacactcttggcttatctttaaatgtctacatttttctatgaaaccaaagtcttcacgtgtaatctgagtcacattcttggtatgtctaattaattcaaatgcttttttcattagagttgacctgcaggttatctacatgcattttccaatagggaaaagcaatcacactgtaaaaggttttgctttgctatttggtaactggcataaaacaaattttatattttattgaaataattcctatgttactgttattaaggtttccaacttactgagattttaagaaaatataaattaatgttattacattcatgtagctatctacattacttttaaaggccttgtgctgccacattactgacctttgactcctaggtctaaaaaggacacacagcattttgggagactaaggcaggcagatcacctgaggtcaggagtttgagaccagcctggccaacatggcgaaaccctgtctttataagaaatacaaaaattacccaggcatggtggtggatgcctgtaatcccagctacttggaagcctgaggcagggagaattgcttgaacctgggagacagagattgcagtgagccaagattgtgccactgaactccagcctgggtgatagagcaatattccatctcagaaaaaatatataaataagagaaaaaggacactaagtcctgctaaatcttaaacactgacagtaattaaagccccatctacagacctggaagaaaatgacaataaaaattcatcatactcttaagacataaggccagaaattgaaactactcaacaactccaggcccagggactattacagaagtggatttgtaagattgtaaaagctaattttgagatataatattacttgagagtttctttataagttaagcattaatattaaatgcacactaatggaagtctagcatctgggcccctgtgacagattgacaagggtttcttgaagaagtaatccactctttagcttaaaaaattattaaaatttataaaagacctatgaaaattatattttatggtaaaagtagttataatttaatagacttatttctcagaattgagagatagttttaatttttctcatgatgttcttataaggggttattgtttagaaaattaattctttcaaaaataaaagtttttgcttttttaagaaatcactgagttttcacttggctaaataaataacttactttacaataatctgtaattccattttgtaatatcaagtgttctaaataaacctttgatatttgacctccttcacaaaataaaagtctaaattcagtcatttgacctcattattcttttttgatatttgatctcctgaagccaaaaagaaacatatttagcttctttggtacaattaaattatactggaagcaatgtcaaatttgaaatggtgtttaactttggactatatttatataaatgtggactatataattggagtatattcatataaattaaagagtacatgttctaaaatggtatgaggttcaattgactttgatatgtcagtatattttgtcagtagtacttatgattattatataaaatttttgttcatcacagaaataaccaaactttctcctcaattctgtctttaaccgtggctattctaaaacttcagccatccacaattgttttcctttgattctttatcaggtggcttataataatctatagaattttgaggggtactcttaaatacacaattgtgacaattttataaattgtgccatttatatacagagaaaaacttccaagactctcatggagacctgatgcatttatgatggttgttaatataatgtcaaacaggacaggacttaattgcatgaactgaactaacaggagcctgaaataaattttatggcttattctttaaagcatttgctaattacttacattttgtttttcagaatcaaaaaaaaaattctcttaagctattcattgtttttaacaattgagtatagtatattctagtgagaaaattcaaaaacacaatttcttcttctctacataatttctccaaaatttggaaactgtgagtattgttatatcaaaatattaattcacataggttcaatataaatctgctttcttccgtaacagggcacaattggagacaatgatcattttaccaagactttaacttgaatgacatattttcatatttactttataaaatgaatttaagctggatagctgataaaagccccttgggaaaactggcatgtaacctgttttgttcagggccctgagctgtagtaagtcaataattttactttctgacagacccaggaatcccaagttgtcttggaaaattgaaaaaagaagaagtaacccaattcatatagctgtctgaaggcacagatgaaacaatgtctgggcttgatgcttttaaagattctacccttagatttcttataaaaaatttccagcaaggtcaatttatgaattaaatagcctatgtacaaaaaatagaaaaaaagagagctaatatgttaaattactatttttgcctcatcttatacaaaaaaattaagcctaaaacttatattacaaataaatttgccctactatgattgtgtctctaataactttggggaattatagagagaaatactgtttcaaaataaacaacagtgcatctgttattagattctaaccttgtccacttgtttttcaatttatattattttctacaatttatattagtttctacaatttatattagtttctataaaaatttatatttgcagaagcctccaaaatatttttcctgatttaaaattaccagaagttaaactgtgctttcttatagctagacatcttatactctaaagaaaataaaatcaatgacatgatttggctctgtgtccccaccccaatctcatcttggattgtaataattcccacatgtcaagtggaaaaaggtgggaataattgaatcatggaggctgttttctccatgctgttctcctgttattctcacaagatctgatggttgtataaggggcctccctcttcccttggcacttctctcttgcagccatgtgaagaagcacgtgtttgctaccccttccatcatgattgtaaatttcttgtggctttctcagccacgcagaactgtaagacaattaaaccttttttctttataatttacccagcctcaggtatgtccttatagcagcatgaaaacggacaaatgtaagcaacttaattatatacaaaaactcttttatacctgcctactgtgaaaggaaaataagtcttgagaccgcaaaatcaccaagctaaatggaagagtcaaactggtgttacaggagatagaaagaaattattttggtagatagttaggatgacagaatttctgccgaaaacatttcttctaacaaaaatcagcttggcaattacttattttctattcacacagagttcaaagaaatcacttctaacaaaaagcagcctgaaagatcaggctgtaaaacatataagcaactctgccacagagagggtgtttctgggtgtaatcaccaaacttcacatacatacactgggccctagtaaaaacagtgggccttaatgagcacattcctttccttttctgggggcactataacatcagaaagctggaaacttgcacaagtttaggatgcctgcacttgcaaggaggtacctgggacctagcatggaaaatcctcttcccctttttagcactctgggagtggagccccagccttgggattcccaggtgtttcccttcagtgatcaggactgaacacacacaactcatcatgcagtttgtgctgagctgggttttccttgttggtattttaaaaggtgattcatggagaactacagatgttgagtgtgagtggacatgagtgagcaaaacagtgggtttgtgtggcagtttctgaccttggtgtctctgtgtttgcaggtgtccagtgtgaggtgcagctggtggagtctgggggaggcttggtacagcctagggggtccctgagactctcctgtgcagcctctggattcaccgtcagtagcaatgagatgagctggatccgccaggctccagggaaggggctggagtgggtctcatccattagtggtggtagcacatactacgcagactccaggaagggcagattcaccatctccagagacaattccaagaacacgctgtatcttcaaatgaacaacctgagagctgagggcacggccgtgtattactgtgccagatatacacagaggggaagtcattgtgcgcccagacacaaacctccctgcaggaacgctggggggaaatcagcggcagggggcgctcaggagccactgatcagagtcagtcccggaggcaggtgcagatggaggctgatttcctgtcaggatgtgggacttcatcttcttccaacagtttctctaatgaacctccctaattttagaattctgtggttcctaatgtcatctctacatattttcaaaagatcattttaatatgaggacataacctctcatgtaccaaatgcacattgatgcttacaaagatgaaaagttctcaaccattgtcaccaggatcgcagtcctgaggaagctcacgggtgtctgatgagtctcctccattcaggcccaggacagaaacctcagggagactcctggactagaacggcagggattctgatcacagccaatagagagcctgggccagggtcagtgtcctgtagaagctcacagggttcacatctgacccttctcctgaccctaaagccaatccgcatcagcactgatctggtgctccttttgctcccaatacatgttctttctttggagtgtttgttctcccttttttatttgcttttctttcttcctgaaaaagaaacacatggtctctatgctctacactccagggctcaaggcattttcttagaactcaggcaaggctcaggcttggctactccagcccacgtgggagaggctgatgggatttccttctctccccatattctcagggccctcctctgtgttgtgtgtagactcatctgggaatgcaattggccgttaatagtgaaggggataaactcatttgatcaaaatgggatgtggatgtggaattaaccctgttctatgcacactgtcagagtcatcttcttcagaagtagtgttagaaagagcttgtgaactttatcagaatcaaaatggatccacttgtgttaaaaccctaatgaatgaagctggggaaggccatgaaggagggttctaacacacatattcctgataagaagaactatcataaatagaccctgcacagccacaaccttttacacagaggccaccacagccttaaaagctttatttctccaagtaaatctgccccgcaactgcctattcaaccttacaccgctatctcaaaatagctgctgtcaccctcctcatttttccttaattctcttttttattattttttaaattatactttaagttctagggtacatgtgcacaaagtgcaggtttgttacatatgtatacatgtgccatgttggtttgctgcccccattaactcatcatttacattaggtatttctcctaatgctgtccatcccccttcccccaaccccactacaggccccggtgtgtgatgtttcccaccctgtgtccacatgttctccttaattctttatcttccttttcctacctgaatgtacccatacatattttaattgaaacgcacatcctagaaaaaatattattatactttagagtctctgtctgttattcaggttgacatgacaagctacagacggacatgccacttttctgtgagacatagaggatgacagtttttggagatgtctaggaatatccaatgtccataagatcagccatcaataagtgcagactggaggtcccagagagaggcgaagctgctgaatcatcgtggaatttcattttctccagttctgctctgatggaatcaggcccacccattttatcaatgacaatctacctaacctagagtcagctgatgacagtattaatatcatctattaagtaaagtcataactatatatatagtgagagagggagagagagagagacggagtctcgctctgtcacccagggtggagtgcaatgtcgtgatcttggctcactgcaacctctgtctccggagttcgagcagttctcctgtctcagcctcctcccagtatctgggaatacaggcacacaccaccatgtccggccaatttttgtatttttagtagagatggtgtttcaccacattggtcaggctggtctcaaactactgacctcaggtgacccacctgccttagcctcccaaagtgctgggattacaggggcaggccaccaagtccagctaatttttgtatttttagtagagaccaggtttcacgatattggtcaggctggtctcaaactcctgatctcagcctcccaaagtgctgggattaaagatgtgagctactgtgcccggccaacaccacctatattaatgttggattgaataactacaaagtctaccctaaccaagtgtaccatcaaacttaccattacccagaggaaagaatctttaacatgagatctatattcttaaatgttttaaggtgtaaaactgaccacagtacaatcacccaattatgattttgctaatgagttgtagaaactgcatgtatattttggatattaacactttttcagatgcacaccttataattatattctctcattctgtaggttgcaattttttccacactttgcggcatctttttgttgtgatgtagttctgcttgttcaattctgcttttattatctgtgactttaatttgaaatatagaaaatcatccttttttatatactttaaattttagagtacatgtgcacaacatgcaggtttgttacatatgtatacatgtgccatgttggtgtgctgcacccagtaacttgtcatttaacactaggtatatctcctaatgctatccctctcccctccccccaacccacaacaggccccggtgtgtgatgttccacttactgtgtccatgtgttctcattgttcaattcccacctatgagtgagaacatgcggtgtttggttttttgtccttgtgatagacttctgagaatgatgatttccagcttcatccatgtccctacaaagggcatgatctcatcattttttatggctgcatagtattccatggtgtatatgtgccacattttcctaatccagtctatcattgttggacatttgggttggttccaagtctttgctattgtgaatagtgccgcaataaacatacgtgtgcatgtgtctttacagcagcatgatttataatcctttgggtatatacccagtaatgggatggctgggtcaaatggtatttctagttctagatccctgaggaatcgccacactgccttccacaatagttgaactagtttacagtcccaccaacagtgtaaaactgttcctatttctccacatcctctccagcacctgttgtttcctgactttttaatgattgccattctaactggtgtgagatggtatctcattgttgttttgatttgcatttctctgatgaccagtgatgatgagcattttttcacgtgtcttttggctgcataaatgtcttcttttgagaagtgcctgttcatatccttcgcccactttttgatggggttgtttgcttttttcttgtaaatttgtttgagttcattgtagattctggacattagccctttgtcagatgagtagattgcaaaaattttgtcctattctgtaggttgcctgttcactctgatggtagtttcttttgctgtgcagaagctctttggttcaacatactcaaatcaataaacaaaatccagcatataaacagaaccaatgacaaaaatcatatgattatctcaatagatgcagaaaaggcctttgacaaaattcaacaaccttcatgctaaaaactctcaaaaaattaggtattgatgggacgtatcttaaaataataagagctatctatgacaaacccacagccaatatcatactgaatggacaaaaactggaagcattccctttgaaaactggcacaagaaagggttgccctctctcaccactcctattcaacatagtgttggaagttctggccagggcaatgagacagtagaaggaaataaagggtattcaattaggaaaagaagaagtcatattgtccctgtttgcagatgacatgattttatatctagaaaaccccattgtctcagcccaaaatctccttaagctgataggcaacttcagcatagtctcaggatacaaaatcaatgtgcaaaaatcacaagcattcttacacaccaatcacagacaaacagccaaatcatgagtgaactcccattcacaagtgcttcaaagagaataaaatacctaggaatccaacttacaagggatgtgaaggacctcttcaaggagaactacaaaccactgctcaatgaaataaaagaggataaaaacaaatggaagaatattccatgctcatgggtaggaagaatcaatatcgtgaaaatggccatactgcccaaggtaatttatagattcaatgccatccccatcaagctaccaatgactttcttcacagaattggaaaaacctactttaaagttcatatggaatcaaaaagagcccgtattgccaagtcaatcctaagccaaaagaacaaagctggaggcatcacgctacctgatttcaaactataccacaacgctacagtaaccaaaacagcatggtaccggtaccaaaacagagatatagaccaatgaaacagaacagagccctcagaaataatgccgcctatctacaaccatatgatctttgacaaacctgacaaaaacaataaatggggaaaggattccctatttaataaatggtgctgggaaaactggctagccatatgtagaaagctgaaactggatcccttccttacaccttatacaaaaattaattcaagatggattaaagacttacgtgttagacctaaaaccataaaaaccctagaagaaaacctaggcaataccattcaggacataggcatgggcaaggacttcatgtctaaaacacgaaaatcaagggcaacaaaagcccaaattgacaaatgcgatctaatatgaaattcttaatgagttctatagttataagtacattatttctccttattaaaactaatcttttttgctgaatgggtggaagatggtggcttccctccaaaagaaaacatagttggttctgtaaagagttcacccatttcttccactataggcctgccctggcataatacaagctcccaacttaagaacttatgattttccatccatgggagaagccatcttttccatctattataaaaacagaagacacttcattaatatcactcccaaaataggctatgtcatatccagtgaggtaggatggctgacagtggtgagaatccaagtaattggtcaagcactgctatgtgtgaagaaacaccacagcatactctacactgtcactcatgatatggaattgttgcctcctcagcaatgtaactgagcccttaatatgtggctgggatgacaaagcaatgccagcctgcagagtggaacctgttcttccttctgggattagccaaaggccggtggcactcatggctgaccctactttccttacaactggacgaagcgaagcaactggatatgaacttctatcccaggatgtaactgtccaaagtgccttctctttatgtcaactggaaaagtgtgaaagacagacactattctcataaacggatatcctagttattccacccactagccagctcttccccccaggtggcagtcatagatttagaattgcaagtagaggccctggctaagcataccaccagtccctttaacaacacctaccataccatcatcattcttactgaagaaacctcacagatttgacaagtgacactatgaagctatatgaccctaggtattgcaactacagccaaaggtaacacttgtgtattaatgaaccctgaatgttgcatatatatacaagattagtcccacaatataactcaagctatgcaagcattagatacccatatttctgctagagatggatgccctctctcaggaccctgcgacagcatggtttagttgacttcctaacacatggaagactttcatatatagtagagctggtatactcttcattgctatcttcagttgctgtggattttattggtaccttgcactttaagtgagaatgtaatactgaccttctcaaaaactcctaggtccttgcaccataatgctccaacaaacacctactgtaattccggagactccagaatatttccaactccagtttaatggattcccttccaatatatacaagctatgccctttctaagaagtagccagattgactatgacacacgttttccatagaaacaaaatggaatttgacagtggggaatgatatacaggcagcttaatttcaaaatgcattttaaacttattttttgaggttttaatattattttcatactccttgaaacctgaaatttcacacttacattctaattgagacttaataacaaataaccagaacacatgaattgcctgtaatctctataccttgtattgtaagccacatttcaagtgtaaccttacttgtcagcacagtatgtttaccataggcataattgcttgtcctgactgtccagaaggcagggtggtattaagtatgcggcctctggagctgggaagtctggctttgtatactgtctctgccactgctaactgaaggacaatgggccagttacttcctgtaccccagttttgtcatatgtaaagtagggttgttgtaagaatgaaattagttaatatttagtacctaacaactagtaggcattacgtggtagctattcgtattgctatcgtcagagaacacacaggagtccattgttatttttaccctccccctccaaacaaaatgtgtaagacactagacatggtagctctgtaacggggttcgtcatgtattaaactgtgtacccaaatgatatgtcaaagtcctgacaaccagcacttcagaacacgtccttatttggaaatatggtagctggagatgttattagtgaagatgaggtcttacttgagcagggcaggccctcaatgtgggaagatgggtgtctttctaagtacaaggaaatttggacacagagacagagacatacagtgtgccatatgacagcagaggcaaagatcagagtggtgcagcagtaaaccaatgcatgtccaggattaccagtcacctccacaagtgaggaaagggcaaggaagaagtctcctgagtctcagagggagtgcagcccagctcacacttgattttggacttctagtctctagaactgtgagacaatacagtcctgtcatttttaagccacccagtttgtagtatttcattttggcagccctacgatattcatacagagttcttcacccaaaaggaagcactctttctcacaaacagtcaaagtcctggatgacggacaacctggagattgcaaacctccaaggaatcaaaggaggttctataaagtctaggagccccatctttcaaaggctgctcctcaagtccacacacacactttggaaggagaatcctgctcttggacatgggatccttagtgagccaactgccaataatccaacatcatcatgaattaaagatctctgacatttcctcgtcaccaacgggaattctgtcaagtagtaagtaaaacccttcttcaggaatctccacaccaaacagttctgcatggcttgggacgcctcaggaaacttataatcatggcagaagaaaaaggggaagcaaggcagtcatacatggtggcagaagagagaggttaaacttttcagtctctcttgggtgtaaagatacaatcttgaggcaaacagcagaatcaattttcttatgccttgaaattctccctttcaccataaatattcccttcacattaatctaactttatgtttgcatcgaactatgtgcctttttggaagttccggaagctaatttgagacagatagacaaagtcgggagaccctgatgcagaattccagaggtgacttcaatgttgctagttaacaacccaggcattgcccagatgatgccagcccaagatccaggtggactgggatgccagagagctgccagaacaagacgcacagacctggttctcagcccaaatcttgcatgcctttcttaccaactttcccttttttaaacccctgcctttccttcaaaattgaagtggttgcttgggatgggaatgcgttcacttcccctttaccattatggttaatacaataatttttgtaccagatctctctcttgttaattggatcctgcaggtggcagattccggaccagagtgacgttagaaactgaatgcacatactgggtggttcacagacacagtgttctgtgaagtttatgggtggattcctggggaagcctgcaagcctgttagtgattagcagaaccgcatccagctactgggatctgcacgccaggtgccgtgagcccctcaccatgttccctggtcccagctgcccgcggatggttcagccttgacaacgggctcggtgttctgggtggtgggagagcaagggggccccttgggcagcgtgctacagggctgtgaatccaggggcccacccggtgttccctgtggagtcactgagggaatgaggggcttctcagggcacagagctgtaacgcctttgtgcagtggtggctgaatacagtgacactgggcgcgtggtgagaagcggggcaaggtcagttcactggaccctccgccctgagcctcagatgagtcgggggtccccagacaggcccggcctctgccctgcggcggacactggagcctttgctgtggccgccaccgaggagccttgacctcaaaggagggggaacctctctacccacctcggaaacctgaagggagcggcggtctctcccagacaggatctcgccggcctccgcgtctccaggcccaaccctgtaccacataaaggaagtccgcgctgagctaccgggacacagcgccgttgggtgggcgggcgcggcgcggcgggaagcaccggggcagctgccacagagatgcgcggggactgtcgggaagtgggcggtccgggaggcgcggggctgatgggacgtgggcggtccggggacgcgcgggggatggcgggacgtcggcgatcccgagatgccagggggcagctgggacgtgggcggtctggagaggcgcgggggcagctgagatgcaggtggtccgggacgcgcgggggctggcgggttgtgggaggtccagggatgcgagggggcagctgggacgtgggagttccggggacgcgtggggtcgccaggaagcggggtctaggacttagatccgccttctcttcaggccatgcagccccgaagctccgaatcctgggatgactcctgtccatgttggaagggaccctgccagtcctggcaaggttcaacggccttagggcaagaaatgttagtagagtcctggaagacgatgtggggaacgggtagcggccaccggatggtgatcgttcttctacaagaccttgacatggatggggagaaacagagaagaaccttccaagtttgtcccactggacatgcccaccacactttaccagccctttctagaaggcctgtgcgtaacacatgaaaaagctgctctcgacctttccctgaccttttaaaagaaaacatttgctgcatctaatccgcctagatgtaaggaggttcccaaatgtatgacagagtcagacaattacatgtcttgtaagttaccatgtgcttgtcttttgttttccgttttttttcgtttttttgttttttgtttttgagacggagtctcactctgtcgcccaggctggagtgcagtggcaggatcttggctcactgcaacctctgcttcctgagtttcaacaattgtgctgcctcagcctcccgagtagcttggattacaagtgtgcaccaccacgcctggctaatttttgtagtttttagtagagatggggttttgccacgttggccaggctggtcttgaactcctgacctcaggtgagccacccaccttggcctctcaaagtgctgggattacaggtgtgagccaccgtgcctggccgtaagttaccgtgtgctttttaaacaaatcatagcaaaggggtgtcttctggaaatgacattttgaaatggagttactagaccacccctggaagggacacagtaaccacacgtccacgttcgttcagtgggtgagaggacatggaggggagacctgggcaggaagggaagagggttccatgccaggctgctcatatttaaaagacattttcattgtagggacatggatgaaattggaaaccatcattctcagtaaactatcgcaagaacaaaaaaccaaacaccgcatattctcactcataggtgggaattgaacaatgagatgacatggacacaggaaggggaatatcacactctggggactgtggtggggtggggggaggggggagggatagcattgggagatatacctaatgctagacgatgcgttagtgggtgcagcacaccagcatggcacatgtatacatatgtaactaacctgcacaatgtgcacatgtaccctaaaacttaaagtataattaaaaaaaaaaaagaaaaataaaagacattttcatatcgttgtcattgttttcttgtgtgcattttattcctcgctattgtatacatcattggaaattctaagtattcttttgaaatatctagtctttctagatgttctgaagtgcctgatgtatgttaaaattacaggtggtaaaataataaattttgtaaatgtctttttgttaaaattcatatgcagtgttttattttattttgatgttggtggggggtggggaggatggccaaatccctgcttgatcaacacacattgcgtttgtgctctggttcaggggaggagagaggaggagaaagtgcagacttccaggcctctgtgcgcaccgggaggagagattaatgatcatctcttctgtctgtgtgtttgttttatttatctatggatatcctgtgtataaaggatgaacaagtcctatttataacatctaatcttttcaggtgttaagttgccagcgtatgacggaagtagcattattaaacgaatgcagcttgtacatattgtgttaaaattcataaaaagccagtcttctgaaaagaacccttgggccctccctccgcagcctccggcgccagctgcaggaagacctggccaggggaaggcgggcggcagaagctgctgctggctgtggggaaggcggtggagcccaggcctccacaggctccccacaggctccccacaggctcgcgcggctctggttgctgggctccgcacgggccgcgtgggggcgcctgctgggagcgaggaggcgccatcctggctcgcctgctccaggaggacgctctgggcctgcgcagatgcagttctccaggatgggcgcgggcgctgggggcggcgctccttgggctgctgcgcctccactgagccgcctgggtgtgaggacctcgcgccggcgcctccgggaaggacgcggagccgccgcggccgatcccagggctgcagctgctgcccgacgcccgcgggaaggcccttccgccaccgcccgggggttcgaacttggagcagctgctgccagctgaggcgccagcggcgtcgggagctcctcagagtcagtgttttgtgctggattcggcatgtcctctgaaaactcgggaatttgtcactgaaatggtgacaggaggtgagaagtttttttagacgttgccttcgctggcctggcgcggggctcaggcctggaatcccagcactttgggaggctgaggcgggcggatcgcttgagctccggaggtggagaagctgccttcgtggtaactgtggtcttaagttcagctgagaacgataaatggcttttccttgaattggctgcttttgtgatttctctcaggctcatcttttgtcagttaaaaatccagtggtaggtgtagcttagagacgggaaatttttggttttgttttggctacacgtaagtgttggaaattattttcttttacgttccagtgtgagcaaatccagaaggatgtcagattaaacaccgaatttaacaaattcagccgggcacggtggctcacgcctgtaatcccagcactttgagaggccgaggcgggtggatgatgaggtcaggagtttgagaacagcctgaccaacatagtgaaactccgtctctactaaaaatacaaaaattagccgggcgtggttgtgcgcgcctgtaatcccagctactcaggaggctgaggcaggagaatcgccgagattgcgccactgcactcagcctgggcgacagagcgagacttcgtctcaaaaaaacaaaaaaaaatcaatcattggaatactgttgttcattacaattaatgaacgtttgatagacgcataaacgaactaaattcacaagtacatataagtaaaataagccaaaaaaaaaaaactacatcccgtatgatgacacttttatacattctacagaatagaaactaaagtgatatgaaggttgggagttgaatggagaaaaggtgagcgaaaagagggaggacggaggagttgcaagagaacaagagaaaatgttgagggtaattgatctgttttctatcttaataatggttatggttacatcaataatttctaaattgtacattttgtgtgttaattataattttatattattcaagctattacaaataaatacctgtataaatttcttagggacggtttaagggagatggataaatcacataaaaagtcagatatttctgaatgtacaatgaataacccttagctctatctttattttttggtaattctaaaatgcagcagatttttttaatgtttttattacaagaagggtttcttcaaaccacaccaggtgtgtgtaactctgggctaaagttggttaagggagcagtgggatccggtggagaggagcacaggcctcgatcctggagcccattcttgtcacatgtgagctcctggacacatctcatagctccctcatgcttctgcgtttacattctcatctgtaaatggaggaccaatgggcatctgcctctaacaatgtattttcatgtgttaagatgatgtatgttaagtgtttactatagcacaatcttttaataagaaattacatttttttccaaatactatcattgtcttcaagccccaccacccaccagaaaacttaatatgctctgtgccctgccctgtcctcagacatccagcccaagagacttttatatagtaggagatatgcaaatagttccctccctctgctgatgatgaaaaccagcccagccgtgaccgtgcagctctgggagacgagctcaagtgccaggattcccaagtgttttcacttggtgatcagaacttaacacagaggaatcaccatgttgtttgggctgagctgggctttcctttttactattttaagaggtgatacatgaagaactacagatattgttcgtgagtggatattagagaaacagtggatatgtgtggcagtttctgaccaggatgtctctgtgtttgcaggtgtgcagtatgaggtgcagctggtagagtctgggggagacttggtacagctgtggtggggttgggggtgtcctgagactctcatgtgcagcctgcggattcatcttgagaagcaatgacatgaactgggcccaccgggcttcaagaaaggggctggaatgggtctcatacattagtgctagtggtggtagcctatactatgcagacactgaagggtagattcaccatctctagagacaatggcaagaacatgctgtacttgcaaatgaacagtctgagagatgaggactcggctgtgtgagagacatggtgaggggaaatcagtatgagcccagccagaaacctccctgcaggaaccctggggtggggggaaatcagctgcagggggcactcaggacccactgatcagaatcaaccccagaaggaggtgcacatggagattaggggctggattccttccaggatgtgggacttcaacttcttctgacagtttccccagggaaccgctctaagtttagaattctgtgtcatctctatgtatttaaaaaagatcattttaatgtgaggaactaactattctcacatgcacaaaatgcagattcacactcacagagatgaaaagtcctcaactgtggtcactaggatcagagtcctgaggaatctcaggcgttcctggtgagtcttctccaatcagacccaggacagacacctcagtgagattccatgactagaacaggctttatggattttaaaaaaaatagactgagccagggtcagtgtcatgtagaacctcacaggtttcacatctgacccttctcctgacactaaagtgtgcaaatcagcatcaatactgatctggtgctgcttttgctcccaatctgtgttctttcttgagttgtccctttttcatttgcttttcctgctccctgaaaaaagaaagatgttgtctctgtggtctaaattccagggctcaagcccttttcttggagctcaggtgggtctcaggttgtggctcctgcagccacgctggggaggctgatgggactttcttctctcccattgctcagggccctccactatattgtgtggagactcatctcagaatagatgtggccagtgggagctgaaggggacaagcttgtttggtcaaaatgagatacaaatatggaattcaccctgtgctgtacaaactgtcacagagtcactttctgaaacaatagtgttagaaagaacttgagaaagttgtcagaatcaaaattgggtcacttgtgttaaaactctgctgaatgaagctgggaaaggccgtgacggaatgttctcatgctcatatccctgataccaagaactatcgtaaatagactcttaaaaccacaatcttgcacaaaggtgcccacaaccttaaaagaattacttctctgagtaatcttcccagcagctctctgtgtaagattggactgatgccacccttgttattgattcttctatcccggagaagttgtctcaaaacagcttatgtaaccctcctcatttttctttaaacctttatctttctttacctgcctgagtgaacccatgcatgttcccattgcaatgtccatcttcaaataattatcattttactttagagtctctttttgtctgttattcagatttgacaagctgcagatggacacatcacgtttctgtaagacttaggggatgacagttttgaggcatggctggggaagtacaatgtccataagattgaccctcaataagtgcaggctgtaagtctcagagctgaagctgctgaatcaccatagaatttcatctttagttctgctctgatggaatcaggcccacctgtgtaatgaatgacactctacctaacctagagtcaactgatgacaggttaaatatctagacagcaaatttgcaacaccacttagattagtgtttgaataactacaaagtatagccgagccaagtatatcgtaaagcagactattatacatggagaatctttaacatgacatctacaattcttaattttttttacgtataaaactgatggttttacaatcaggctgtcatgattttgctaatgagttgtagaagttacatgtatgttttaaatattaacagttttttcagatgcctggtttgcaactatattctcccattctgtagatttggaattttttccatgctttgcaaaatctttatattttgatgtagttccagtccttcaattctgcttttgttgtctgtgcttttaatcttaaatttaggaaatcattgctaaccttttggtgggagagaattttacaattgcaggctatacatttaactgtttaacccatctagagttgattttttgtgtttattctaacctaatattcttaactatttgcaagtgaaaacccagtttgtttaacaccctctttaggggagagtatgatttagccgttgtgtagaaaatgttataaatcactttgccttcatattggttctcaacttgaaaatgagtttgccatcaatacgtgggtttatttctgagctctctatatgtatttatgccagtaccatcctgttttgattatgtttgtaattaattttgaagtctgagagtaaaatgcctccaagtttattcttgcccttttgcagatattagacaaaatattttaacatttcaccatgaagtatgataacagctatggcttttcataatgaattttattgtgtttaggttattttcttgtatttctattttgggtagagtttttatggtgaaaccttgaatttttttaatgttattttctgtctgagaagttaatgggaccttcttcgtatttaatttggcataccaaatgtattgatttgaggattttgaatcatctgtgcatctcaaaaataaatttgagttggtcatggtgtatgatccttctaaagtcctgtggaacttagttgactattatttggtgtgtggagggggctcatttatgtctactaggaatattggtctgtagtttacttttttgtgaccttgtctattactgaaaatacggtaatttgggccttatagaaagactggaaggttggcatctcaccaatttttgaaaaagttagagaatggttggcattacttctttaaatgttgagagtcctttttttacttaacatgtgacctatcatggagaatatttagtctttgcttcggaagcatacatattacactgctcttggttggaaggttctgtagatgtctattaggtcaatttgttcaatagtgttgttcaagtccactgtcttcttaagaattctcttaatgatgttctatccatcattgaaagtgaggtgctaaagtcttctcctaatttttattattttctatttatctctccatatctcttaaggtttgcttaatgcagttatatttatttttgtacaaatatgtaaaaaataaatgaaataataattgctaagtaattttaatggcaaaatcacataataagaaattatattttcccaaatgctgtcattgacactaagctcctccaggaatctcacatctgctctggacacggctctcctggtgtcctaccccagagcttgctatagaggaggagacatgcaaatagggccctcactgtcctgatgaaaaccagccttgcctgcgtctacgggagaagagccccagtccagaagtaccaggggtttccatttggtggtcaggtctctgaacacagaggactcactatggagtttgggctgagctgggttttccttgttgctaatgtaaaaggtgactcatggagaactagagatattgagtgtgagtggacacaagtgagagaaacagtggatatgtgtggcaggttctgaccagggtgtctgtgtgtgtttgcaggtgtccagtgtgaggtgcagctggtggagtctttgggaggcttgttatagcctgggggtccctgagactttcttttgcagcctctggattcacctttagtacctttattaggtactggatgagctgggtccatcaggctcctgggaaagggctggagtaggtctcatttatgagttgttgtgtaggtagcacaagctatgcagactctgtgaagggtcgattcaccctctccagagatgatgccaagaaatcactgtatctgcaaatgaacagcgtcagagccgaggataggtctgtgtattactgtggtggcattgtgtgcatcccttgtttaggtacatgcagagatgctgctttggtgtgttcaggggctcctgttttggggacaccaattttggagtttgcagtatccttgagtccagtacgttcatggtggcattgggtctggggtgtgcagtggcaatgagtccaggatacatgcagctgatgccgtatcttgtgaggacaagaacaactacaaaacgatcctattaataaataggcaaatgacttgaatacacatttttcaaaaaatacatacaaatgacatatagatatataaaatgttaaatatgagtaataatttttaaaattcaaatgtaatctacaataaattatcaccccatacctgttagaatagctatttttaaagaagatgaaagataaccagtattggggcagaagtggagtaaagggagcctatatatattgttactgaaaatgtcaattagtacagacattatggagaatactatggaggttcctcaaaaaataaaaatagaactaccatagtttccaacaagcccactactggctatgtatccacaggaagtgcaatcagtatgtcaaagagacatctgtgcccccacgttcattgcaggaatatttatgatagtaatgatgtgggaacatcctaaattaccataaatggatgaattactaaagaaaatgtagtatgtacccaatggagtaatgttcatcctaaaataagaagggaatcctgcatttgcaacagcaggcatgactctagaggaccatatgtgaagttccacaggcaggcgcagaagacgagtaattcgcgatttcactgtagtttgtttaaatggtagactcacagaagtagagtggagtgttggttaccaggggctggaggggtggactggaaaaggcgagattttggtcaaagggtgaaatgttccagttagacagaaggagaaagttacagtgttctaatgcacaagatggaaaatatggctaataatgcattatatatttcaaaatggctaaaaatgcaaatgttaaaaattttctcactaagaaatgatacagcctgggcgcggtggctcacacctgtaatcccggcactttgggaggctgaggcgggcgaatcacaaggtttggagttcaagaccagcctggccagatggcaaaaccccgtctccactaaaaacacaaaaaatagccaggtgtggtggcacgcggttgtaatgccagctactcgggaggctgatgcaggagaattgcttgaacccgggagacagaggttgcagtgagctgagatcatgccactgcactccagcctgggtgacagtgagactccaactcaaaaaaaaaaaaaaagaatgaaatgatagctgtgtgaggtgatggatatgtcaaatagcttgattaacaattccataatatatacatgtatcatagcatgtgtgaggtgacctgtatgaaggtgaagtgacctgggggctgtgtaagattacctgggggtatgtgtgaggtgaacacggcacatatgaggtgaccagagacacatgtgaggggacatgggagatatgtcgggtaagccagggggatttgtgaggtgacacagagcaagtgtgaggtgacgtggatgcatgtaaggtgatttggggcacatgtgaggtgacgtgggggatatgtgtgagctgacctcgggtgagtgtgaggtgatccaggatggatgtgaggtgacctgggggtgtgtgtgaggtgacttgggcacatgtcaggtgacatcggggattggtggtgatgtgggtgtgtgtgaggtgacctaaggaggtatgaggtcacctggggcatctgtggggacctggaaatgtgtgaggtgggtacaggtgaagtcacctagggcacatgtgaggtgacctgtggaatgtgtatggtgacctgggaccgtttgaggtgacatggggaatgcgtgaggtgacctggggcatgtgtgaggtgacaaagggcatgtgtgcagtgacctgggtgcatgtgaggtgacctggtgcatgtgttaggttacctgggggatgtgtgaggtgaacaggggcaggtgtgaagtgcctgaggaatgtgtgaggtgaactggtgcatgtatgtggtgacctgggggatttacgaggtgacctgcgggatgtgtgaggtgaccttgggtgagcgtgaggtgacctgacgtatgtatgaggtgaccagggtgtgtctgaggtgatgtggggtatatgtgcggtgacctggtggatgtgtgaggtgacctgcaggatgtgtaaggtgacactggggatgtgtgaggtgactcagggcacatgtgaggtgaaattggggatgcgtgaggtgattcagggcatatgtgaggtgaccttggggatgtgtgaggtcaccttgggtgagtgtgtggtcatctgggatatttcccaacttcgtaaggaaagcctgcaacaacacatggcattagaagcttcacactctagcaccattaatgcgtacatcctcaaggaactctaaatgttttgaggttagcttaaatgccatggagcggcaccttccccaggcacactcatatatgcatcctgggtctccctgccaagctatatctcctcaaatttacagtttatgtttgctctgtgacatcaactctgatatgttcaagtgtgtttttttttctttatttgtagttgttcaggcttgttgtttcactctcattactctgggctcagtcctctcctcaggtgtcccacttcagagctcgctgtgaaataggagacatgcaaatagggccccccctttcctgataaaaagcagcccagtcctgaccctgcagccctgggagagaagcaccagccctgggattctcaggtgtttccactttgtcatcagcaacaaacaaattaccatggaatttgggctgagctgggtttttcttgctgctattttaaaaggtgattcatgaagaactaaggatattgagtgagtggacatgagtgagagaaacagtggatttgtgtggcagtttctgaccagggtgtctctgtgtttgcaggtgtccagtgtgaggtgcagctggtggagtctgggggaggcttggtacagcctgggggatccctgagactctcctgtgcagcctctggattcaccttcagtaacagtgacatgaactgggtccatcaggctccaggaaaggggctggagtgggtatcgggtgttagttggaatggcagtaggacgcactatgcagactctgtgaagggccgattcatcatctccagagacaattccaggaacaccctgtatctgcaaacgaatagcctgagggccgaggacacggctgtgtattactgtgtgagaaacactgtgagaggtcggaagtgtgagcccagacacaaacctcctgcaggaacgttgggggaaatcagctgcagggggcgctcaggacccactcatcagagtcaaccccagagcaggtgcacatggaggctggggtttgtttcctgtcaggatttgggacttcctctgcttctgacagtttctctagggaaactctttaattttagatttctgtgcccaccaatgtcatctctacatttttttaatcattgtatatgaggactcgttctcacatgcacaatatgtatattgccacctatgggaatgaaaggtcctcaaccatggtcaccagcatcagagtcgtgaggaagctcaggggtgcctggtgagtcttctccagtcagactcaggacagtaacctcaaggggattcccttgtgagaactcacacattttcatgagaacagcaccaggagtcagttctaaaccattcatgaaagacccactccatgacccagtcacctcccaccaggtcaccccttcacaactggggattataatacaacatgagatttggggcaggacacaaatccaaaccatatcagatacacattgtgaaatacgcatggtggtcaggtaatttgtatttctatcacctcacagcgctaccattttattattttttttaatttactgcatgagtgagtgtctgatgagaacacctaagatctaccctttcagcaacaatcatttttacaatacagtattaactataggaccattgctgtacgttagatctccagaactcatccaacctgcacaactgaaactctgtacaatttaacacacatcacccaatttccctcacctcccaggtcctgggacccactattctactctctgctttcaagagcttgaatattttagatcccacatgtaaatgagatcatgcagcatttgtctttctgcatctggcttattcaactcagcatcatgtcctccaggcccatccgtgttgttgcaaatgtcagaatttccctcttttcaaagccaaacaaaatacagatgtatgtatacacattttctttatacattcatccatttacagtcattaaattattttacaaatctacactattattaataatcttgcaatgaacatgtctttggcaaagtaattttatttcctttgcatatataacaagaagtgggatcaccagattatatgatagctttatttttaacttatcaagtaaccaatcctaccacaggatatttccctttcccccacattcttgccaacatttgtcatctgttacatttctgataatagccatattaactagtgtgagttgatattgcattgtgcttctcatttgaattcctctgataattaggaatgttgagaactttttcgttttctgtttgccatgcatgtatcttctgaaaaaaattatccaggtttttgcccttttttatcagttcatttgttatttgctgttgaggtgtatgggttatttatacatttggacagaacttcttgtcagatccataattgcacatagtttttcctgtgctttgttattaaattcaaagaaatcagttccgaattaatggcaggaattttttttgctccatgtcatttatgagtttatggcttcaggtattatgtccatttttagttgattttttttttttttgggagacggagtcttgctctgtagcccaggctggagtgcagtggcgcgatctcggctcactgcaagctccgcctcccgagttcacgccattctcctgcctcagcctccgagtagctgggactacaggcgctggccaccgcgcctagctaatttttttttgtatttttagtagagacggggtttcactgtggtctccatctcctgacctcgtgatccgcccgcctcggcctcccaaagtgctgggattacaggcgtgagccaccgcgcgcggcctattagttgatttttttatatggagttagagaaggcctaattttatttcttttgcatatgaatgccagttttacaccattattgaaaagactgtcctttctctactgtgtgctcttggcacacaaaatcaggagagacataatgacaaaaaaaatatgagatcaatagtcctgatgaacatagacctgaaagtcctcaacaaaataccatcaaattgaatccagaagcactttaaaatgtgatacatcatggtcaggtgggctttacccctgggatgcaaggctcgttcaatatccacagtaactctgattcacaatgtaaacagaataaaagcaaaaagcatatgattatgtcaatagatgctgagaaagcttccgataggatctaacatctactcatgataaaaaccctcaacagactagacatcaaagaaacatacttcagaataagagccatctacaacaaacccacagttaacatcatactaaatgagccaattaaaacacttatctttataaatgacccagtctcgggtgtttctttacagtgcgagaatggactaagacagcatccaaataggaaaggaagtcaatccgtccatcttcactgatgatataattctatatctagaaaatcctaaaaactctgccaaaataattctagaataaacaactttagtaaagtgtcaggatacaaaatcaatggacaaaaattaccagcatttctataagccaaccacatccgagctgagagtataatcaagaacacaatcctattcgacttacagtatccacaaagaaaatgaaatgcccgggaatacagataacaaagtgaaagatccctacaaggagaactatgaaacacagcatacataaatcataaatgatacaaataaatgggaaaacatttcatgctcatggattggaagaatcaatattgtaaacattgtcataatgcccaaaggaattcagattcaatgctatttacataaaactatcatcatcattcttcacagaatcagaaaaaaatctattctaaaatttatatggaaccaaaaaagaccctgaatatccaaagcaatcctaaggaaaaagaataatgccagaggcatcatgatactgaccttaaactacaccataacgtcttgctaacaaaaacagcctgtactggtacgaaagcagacctgcaggaaaaaaaatagatcaaaatagaagacagaaataaagttgcacacctgcaaccctttgatctttgacaaagctgacaaaaacaagcaatggaaaaaaaaaactctgtgttcagtaaatggttctgggataactggattctggcaggtatgcaaaatgcaagagtgaaggagcctgtgcagcttctacctagatttcagatgtgtagagagccctgcatgcccaggaagaagcctgctgcaggagtggatccaccacagaaagcctctactagagcagtgccaaagatggggaaagatggagttggagcccccattcagagtccccactagggcacttcatagtaaagttgtgggaatgtggccacaaccctcaagaccccagaatggtagagctacgggcagcttgcaccctcagcctagaaaagcttccagcacttgactctcacttgtgaaggcagccccgtggtctgtgcctagcaaacctatagggattggctgcctgaggttttggggacccaatccttgttccagtgtgccctggttgaagtacataaagtcaagagagattattttgtagcgttaggatttaatatctgcagtgctgggttttatatgtgtgtggggcctgttggttgttcctttggccaatttatccctttgggattggaattatttacccaatgcctgcatcatcattgcaccttggaagtaaacaacttttattttttaaatttgcaagctcacagctggagggacattgccttaagactcagatgagactttgaaaatttgagttggacgttgatgaagttaagattttgggcactattgaaaaaaggtgattatattttgcaatgtaagaagaatatgagaactttgggtccgagagtgcaatgatataatttaggggttttcccctccaaatatcatggtgaaatgtgacccacaatgttggaggtggggccaactgggtggtttgggtcatggggaaagatttttcaggactggcttggcatccaccccatggtaattagtgaattcttgctgtattagctactgtgagatctgattgttcaaaagagtcttgcaatcctgctaccctctcatgtaacccctcctcacaatatgacacagccttctccccctttgccttccaccatgactgtaagcttcctgaggccctcacaagaagcagatgctggtgccatgcttctcacacaacctgcagatctgtaagccaaataagcctcttgtctttgtaaatcacttggcctcaggtattaatttatagcagtgtaaaatagactaatacactgcccaaagcaatatacagagtccatgcaatttctatcaagtaactaattaattatgtatttttaaaaatcctaaaatttatatagaaccgaaaaacactctgaatagcaaaagcagtcctaaccaaaacgaacaaagctggaagtaccacattccctgacttcaaattacacagcacaaagataataagaaaggcagcatggtagtggtagaaaaaaaatcaagagcccagatatatagccaaatatctacaaccaacagttctttgacaaaactgacaaaaatatacactggagaaacaaccctctattcaataagtagtgctgggagaattagatagccttatgtagaagaataaaatgagacttctgtatcatcatagacacaaattaactgtgaatatggattcaatgtttataaactcataaaaatacttgaaaaaatctaaaaataatcctctggacattggcctaagcaaataaaatatgactaagacttcaaaagcaaatgcaatgaaaacaaaattagacaaacaggattaattgaaccaaagatcatctacacatcaaaagaaagaaccaatatggtgaacagacaacctgtgaatggtaaaaaaaaaaaatgtgcagtctattcatcaaatatatagaatctacaagtaactcaaataagtcaactagaaataacaacttcataaaagagtgagcaaaaacgagatatttctcaaaagaagacatacaagtgttcaacagaaataaaacatgctcagcatcacaaatcatctgataaatgtaaattacagacaacatgatatagcatcttccaccagtcagaatggctattaaaaataaaacagatgtttgcagagaagcataggaaaaataatgctttttatatgcttgatgagaatacaaattggtacaacctctatgaaaaacaatacagaaatttctcaaagaactaaaattagaattaccatttgacccagtaacccctcctggtgggtatgtttctcccaaaaggaaacttctatataagaaaaagtcacctgcattcctatttttattgcaacactattttcaatagaaaagtcaagtaatctctctaagtgtcaatcagtggatgattaaataaaatatgatagatgtaaatcatggaatactatgcagccataaaaaatgaaattgtgtctttcacagcaacatgaatagagttgaaggacatttcctaaataaaataactcaaattctcttttataattggaaagcaaacaatgggtacacatgtacatagagaaaaacaatagacactgggtactgcaaaagaaggcaaggtgagaggaaagtgagggttaaaaaatcagctattggctccaatgttcactatggggtaacagttacatcagaagcacaaacctcacctttatgaaatatattcatgttacaactctgcacatgtgcaccctgattctatgaaaataaaaacagaaaacatgaacagaattgttagactgctagctagattgaccaacaaacaagaaaaatgcaaaagtagcaattctttgttttgtaaccctttctcattttctggtaccataagaaattgtagactatcgtcctatattcttttctgaagtgctaccattagccatttctcaaagaaattctggttccttttttcttttattttctttcattttttttagacagagtctgcaacgtccacctcccaagttcaagcgattctcctgtctcagcctcccaagtagctgggattacagacgtgcaacaccacacctggctaatttttgtatttttagtagagatgaggttttgctatattggccaggctggtcttgaactcctgacctcaaatgatctgcccacctcagtctcctaaagtgttggaattatgggtgtgagccactgcacccagccgctggttccttttacagaagaatagtattaaaaactcatatcttgattcttgatgtactttttgttaatttcttgtagaacatctcaagtaatcaatacaggaagtatttgttgtgtattaacccatatatatatatacccacatctaaacggtttttatttatgttcctatattatgctaaacttgcaaatccactgagataccctaagttaataccacatgaatgattttcaccttccttctatgcctttccctaacctagcactccaaccgtggggaaccccctcccaccacacaccatccattccctttgtagtccatttccaggattcctgtagagtggaacccgattgtgtaagttgtgctcttttgtggaacatcatcaagtggagtccagtgctgacgtgcagtttcttttttctttaatcttatggactacactatttctgaacctacttagtacctcttttgatttcatacattagtataatggcataagatattttctatatagtctgcattccatcctggaattcctaatcacctatttttttaaaatttcttgtggattaagattgtattagtcagtgtcccctagagggacagaacaagtaagatacacatacacacacacacacacacggagtttattaaggagtattaactcacactatcacaaggtccacaataagccatttgcaagctgaggagcaaacaagccagtccaagtcccaaagctgaagaacttggaatccgatgtttgagatgaggaagcatccagcaggggagaaagatgtaggctggaaggcgaagccagtctaatcttttcatgttcttctgtttactttttattctggccacacttgcagctgattagattgtgccacccagattaagggtgtatctgcctttttcagcccactggctcaaaggttaatctccttcggcgacaccgacacagacacacccgggatcaatactctgcatccttcagtgagatcaagttggcactcagtatttagcattacaagtccaccctttgtcaacttgaacccatacacatctcctgagattatacataatcttcaaataaagacaagaataaagtcataattatgcctaataatacaattattcttcttacaactggaaacacaccaatccccaatccaaatggtactacatatgctccactccctcaaggacacagccaggatcatctgatgacttggtgtctagatggcttcagcacttttaattttacctccaatgttagactccactttatcaatgcagatgtagcagaatattttaagacattgatatgctgaaaaattcaacagttcataaaagttgccttcccaccacagccagtggttactactgaataaggacctgccatcctctagggagaagctataatggatggggtgcactgttggtggttatggaaatcgatccatcgtggcaaatggcagcatctttctttgataacattatattctattgtgcatatataccacattgtctttattcatttgtctatctactgacagattttttccatatgtttgctgttattaatagtgtttcaataaacataggatgcagatatcttcacaaggtggtaatttcatctcctttggatatactcccagaaacaggattcctggtcatacaatatttctggctttaattcatttaggagcctttatactgctttccataattgtgaaaatgtagaatggtatagccattatgaaaaacagtttcagttttgaggtatgatctgtaaacaaataatgtttgttatggctctcaatgagagtttctactaaatatgatggaaggtcaggaaggtctctcaccttaaagcagggatggattatgcctcttatttcctaaaagcaaaagattggaagcatgcatgatggaggtggttggcaggtttcaggatgatctcataagaggagaatctgttggataaaactgttgggttttcagtcatagacacacctacactcaatatgaaatgatgaaatcaagtgaggatctagaatgtgttcgcttgaagcaacagcatattctcaaaggcacctattgctccatcacaagggtgatgaacttttgaaaccagtaaagtgtgagagcacagtaagtgataaagttatcacatttacatgaagtttgtttaatgtgccaagggctcgcacagattaatcataaataaacacaatgtattttagcatacatagatgtctagagaagaatcttcttagagaaacttcttcaggttacagaaatctgtgtaagttgtagatctaatggagaagtgtctatgaatactggtctgtttttgaagtatggaaagatgatctcttttggagtaggcttgcgattgtgttgatttcttaattgtttcttgagttgtaacaaaagaaccaaaaaaatgactaaccggagtttcatggctgtgttgataaaaatttttcataagctttctgtcaattatttgagaccagatttcctgatttttttctccaatagatacatgttcacaagatctcaggaaaccacctctcaggtgctttagtttaaaagactagcttcctagaaaaagaagattctgtctaaccatgacaagttggtttcatctgcaaaccatcaagtttgagacctcattgtcaagaatcataaaaattttaactccaatgtactgaaaatcataaatctcgaatttaatgttgataggcattgacaaaatggttcattcttggatgcgtcctatgttgctggctcaacatatcagttaattgagaatcctcacttagctccctctgtttgtagcactgagttgattgtcaatcttcagagtcatccgttgaaggagagtcctgaggttcatgggattcttgtagacactcaggggaacaaaagaaagaaacagaattgagggctgccagccatttccacatcactaggaataattaccatctaagtataaaggtctgcatcattcagaacaccctgcatgacaggctgatgcaaaaaatccaaccctacagaggctccacagcaacctttacagttctttccgggaagaaataatctccaagttaagtgagtcagtaaagctgctctgagctacagtaaaaattggattgggcccgatttgtctgagttcagtgtaattattatactcagctgctgccccaatatagactgaggatggataatttaaatgagcctggctatgtggtttgttatatatctgaactaaataaacataaagggcctgtctggactagcgtgagggtgagagatcctgggagccccagccccccatactcttatctcccttcctccaggaacctctaggttctcagggtgagaatccacaagatccattcatggctctattaccaggagaccaaaatctctgaccttgttcatacagacaaacaggcgaaggacatttttagatccttatctatgtggcgaaaggcaatctatccccattacaagccttaccagcaaccttcctttgtcatgaaaatgggtaaaattagccaataggattacatttaagaaaattttcctgtgatgttccagccagaaaacagcaaaaatcagcttcacacctggagacttcttgcatcggtcacagcccagagaaagaagatcaccatagcattaaaatgcaactgtaagaacatgtaatgcttccatgttccacgcattacgtctcaccagtttagtcaatatggattaaatatgagagtgtggcaattcgcaaactctatctgaggaggaaaatcggataaaaaatgttatgaaaaataaagcaatttgaagcctctgacttcagcaacttcaccactaatgaaatgatgtaaccctcattggcctcaaatttagttttcacggggcatctgcagggttccaaagtgagaccaggtgaattcaatgtgcatgcacttcccaagtgtccacttgtattctgtttctttacttctgtttacagaaagtagacacatattcagtcttagtaccagtgtagggagcgctttccatgagatggataccagaaaaaaatggcaaacatgggatccgttaatataaaaattagccacgatgtatatatatatatgtgtgtgtgtgtgtgtgtgtgtgtgtacacacgcgcgcgcatgtgtgagttgaatagcagagttggagtgggtttctatccacatgtacctgcacctgcaggtattctcaggtgccataatcaactgtaggaccctaaaggaaataagagtctcccctcaacccctgaagagtgtttgggttcaccgtgtgtccaatgattctgtgcctcttgagctccaggaaagggctccctggtgatgcatgagatcttttcttggagtctctctgcagagttcactgggtttcctaaaggcaattcactatttcaaaagatggtgtgaggagcatgtggtgtccctaaaggagaattctgagccagggcacaaccactttatactgagctggatacactggtaggaatatactctgtcagctcagatagaaacctccctgcatggttggggctgggctgcagggggcgctccggatacacccagcacaggctcccgccccagagcaggtgcacaggaggctggggagaggttcctcccagggcctgggacttcctttaaaaatatctaaaataagtatttcacaaagactgctgaagtttgtataaatatctattcaattgtgagcatttatcaaactggatgttgtaatgagaaccacttttacaatggggatttcaaactctgctggaggtcaggaagagatcctttcttataaataaatgcaatttttggataaacacagtcattccctaaataacgcattcacatattatggtctagaaatgatgcaagttgaccctgagacagtcaaatgtggtttcaaagtgaggtgctgtccttgaggagcttgttctccagtgggggaagctctgtcaacacagagttcagggatgtgtaggggacacatggcctctaacaggattacggcttgaaccctcagcttctacagttgtgtcacccatgtgtctgtttctcatactgggtcaggaattgggctattaaatagcatccttcatgaatatgcaattaactgaggtgactatagtatctccgttccctgagagcctcacccaacaaccacacccctcctctggagaagcccctagatcacagctcctcaccatggactggacctgaaggatcctcttcttgatggcagcagcaacaggtaaggggctccccagtctcagggctgaggaagaaaccaggccagtcatgtgagacttcacccactcttgtgtccactccacaggtgcccactccctgcagctggtgcagtctgggcctgaggtgaagaagcctggggcctcagtgaaggtctcctataagtcttctggttacaccttcaccatctatggtatgaattgggtatgatagacccctggacagggctttgagtggatgtgatggatcatcacctacactgggaacccaacgtatacccacggcttcacaggatggtttgtcttctccatggacacgtctgtcagcacggcgtgtcttcagatcagcagcctaaaggctgaggacacggccgagtattactgtgcgaagtacacagtgtggaaacccacatcccgagagtttcagaaagcctgaggaaggaggcagctgtgctgagctgaggcagtggtacagcagttttctgaacttccatagtatctcattttgcattgagttccgctttaatattagccaagaatatgggatagacgggtgctcctaagagatccttaacttgcccattttgatgggttttcccaaagacgtgagaagccacttttttcgcaaagcatcccaaagccatgccctgctccagaaacacgtgtatccatttcctggtctttgattaactgacaaactctcatcagcgcacctgggctaatttcacatcaggtagaaatatgtgctttaaagcaaggctaacgttgtaatagcaattcctgcttaataaccttcagcattgttgttgtgtgctccatcaactaattacgttagttcaaggttctcaatgggagtttctaataaatataagggatgtatagaagttcccctaattaaaacaattgtgaagacaacctcagtgttcaaccatatttcaacccttcaccacaaaggaactttcatctctcctggaagttgggttcattttcaaattagtttttttattttaatatctcaagattattgtatgtgactattttagcagaaagtgaattatgggaacttgaactaaccaactgaaaatacattcagaactaattaaacaagatgccagaatgtgattggctccaggcattttaaattcaacaggttatgtaaccaggctttaaatttgcacatcttcgtgttaccttcatgacacagtcaactcccattatgtaagaaatggtgagtgcattcccaagggtcttgcacagttataaaaatagacttgatgaggtgaggagttgtttaaattcccctctgaagaagcagcatcaacccaacaaaccactctcttccctctgtgactagagctctgtcacaggccacatggacctaaatccttgatggagattacaggactacgtaaattggactgatcgtttttatgctgttaaattaataggtgagtctgcactccagcctgggcaacagaataatcttgtctgtaaaatacaaaagaaagataaattaatagatactgactttgacatttcggataataatattttcataaaccgaatttaattatacccacattgttacctacaccttcactgaaaagttcctagttatgttgagttccatcaacactccacatgttcaaatctggacatccaagagagtctagagaataaaacgcaatgagggcagtgaaacttgcgtatattcagcacctcttaactcaggaggactcaatacaccctggaacactctgcttttctgaatggctcacaatgactccagctcactctccaacctcctcaaacatctggcctctgtttgccctaagttcacgctctgctcttagtctatgttctgaagtctttgtagaggtgaaaatgagctgtcagatggatcttccttctcactgcaacatggaatttgctatttcacttaatgaccactctttccacaatggttgatttcttttggcctgttcattactggtgattttcaagggaatctcagttgaatctttactgttttgcattttgtctccatgacaatgttgggaagtttttcttctagcagcataacatgatctagtgacctgacacatttgcagcaaacaatacctacaaattcagaagctctttggttttctttccacgaaatataattcttgctcttctgtgtatgagcacatcctagcatccctgtacacacccacgtagatgtctacacgccgatgaaatattccctgtaaataaaaaaagtatctcagtttctctcaatgttcataattctcctgagggtgaggaaggtacttctgggtctgctcaaacaaatggcccagagaccacctggtaggtaggtaaggagctcacctcgctctggatattgagtctgtctctttccctctgtcgtctcatagaaggccagcccacttgttcagctcctaagaagagagcccaggtttatccagattatacaacacaaccagcttctgatgactctcctgttacaacatccatggagatattttgtgtattatataattcaccaaactaatgtgaaatgcccaagttgcaatactgcacaccctagggtatgttcttgcaattcagcggaggagaaattctttcagagacagatggatctgaattggtaaatatgtgggtacgaattctgggcttgagtgtcattgtccagccatgtttcacaggtgtgacctgtcagggaagaaccagagttccttgttctctcagagggtagagctcacagaggtcctctctggttcccaggaaaggtaatttcactaatcttggtgatgagactatcctccagtgctgatgtactatagagttttcatctgaagctgtcactgctatccccaatgtacatcttttcacacagaaatgtttagaggtcaggccatattctcagggttacacattgagaaggatggagatatattctactaccttctcctgagatctcacacacaatctcaaatttcaaaaggtctcagaagggcagctctcaggtactatttaaaaataacccacttcctgggacaggtagcatccttctaaccatgatggatgttctgaactacagtacacattgcatggatccaggtttgtctcaattcactgtgattattacactcagcagctgtttcaatatgtctgaaggggtaaatgacaatttaggtgacctgggtgtatggttggtgttatatgaatctttaaatgtagaacagtattaactgtattccaaaatctgtctttgatccatgatcacacttgtctcccagaccagctccttcagcacatttcctacctggaagaagaggactctgggtttggtgaggggaggccacaggaagagaactgagttctcagagggcacagccagcatacacctcccagggtgagcccaaaagactggggcctccctcatccctttttacctatccatacaaaggcaccacccacatgcaaatcctcacttaggcacccacaggaaatgactacacatttccttaaattcagggtccagctcacatgggaagtgctttctgagagtcatggacctcctgcacaagaacatgaaacacctgtggttcttcctcctcctggtggcagctcccagatgtgagtgtctcaggaatgcggatatgaagatatgagatgctgcctctgatcccagggctcactgtgggtttctctgttcacaggggtcctgtcccaggtgcagctacagcagtggggcgcaggactgttgaagccttcggagaccctgtccctcacctgcgctgtctatggtgggtccttcagtggttactactggagctggatccgccagcccccagggaaggggctggagtggattggggaaatcaatcatagtggaagcaccaactacaacccgtccctcaagagtcgagtcaccatatcagtagacacgtccaagaaccagttctccctgaagctgagctctgtgaccgccgcggacacggctgtgtattactgtgcgagaggcacagtgaggggaggtgagtgtgagcccagacaaaaacctccctgcaggtaggcagagggggcgggcgcaggtactgctcaagaccagcaggtggcgcgcggcgcccacagatcccgaggccgggtccggagcaggtgcaaggagggcggggcttcctcaacagctcagtggtctgtctcctcgccagcacctcagatgtccccaggactctctttctttattatctgtggttctgcttcctcacatccttgtggcagggaagaaaggaggaagacaatttttctgtttactgttgaggtttcaccaattactagaaactttcctacaagttcctgcatgactcattttgccatatatggattctcaccatctcttgatttgtttcatcaatcgaattgtgccctatttgaaattaacttactgaaaccttaaatccaatggatctatactggaattttaatgatgtaattgaggttaaatgtggtcaaagtgtgagaccctaatgcaataaaccgttgtctttataagaagaggaagagacaccagagacctctcacttttcacgtgcacacagagaagaggccatgtggagacgtagtgcactagaaggtggccctgtgcaagccaggaagaagccatactaagaaccaattttgccagctccttgatcttcgacattcagactgtagaattgtaagaaaatcaatatttgttgtttaagccacccaatcctgttgtcttcttacgaagacccaaactgactaataccacctaactctgttagctctgtctcctggagggagaagcagccccctgaggctgggcactgcatctctcagatttccacgtgaagtaggcaaaaatagtagttctcatataaaaatgtgtcatggctctgttggccatttttgagcatggtctctgaaaccagccctggtgtgtgtgtgtaacaaatgtcccttatcttttatttggacataacaaatagacgataggtaccagctggatggagattggccactgatcatcttctgttctccttagtatgtcacagaaaaccacaccaacatcaccagcatcactgtttttcttctaccacctcaaacggactacagaaatgatccctgcagtatggtctatttcttcggctttcgaaatttgcactgaatctcttcctaaatggggagctacatggggtctgagttttgttcctttcttcccagtcttccccaagtaccaaggacagaatagacttaaaatttggccatcaatgcccccaaacaccacatcactttctaaaatccacatcctgcatccatccttctctggacacccctcatcaggctacccaggaatggccagaatctggtatcagcttatgggctgaggccacgagttatacacatgtgtgatttcagtcacacacactctacttcaggaccacacctgtgttctgaggagctcaggcacctgctgatctcagtaattctctaataaatcacacacctcttattaataaaggtccagatggccccatcagctgcagagcagtggagtaaagctcatgggtgggtccatcaggcagaagtcagacaatggaagggatggctggtcacttccattttcactgatgttcgcaatgaattttaatggaataaaacaatattaactacaaagagacagaaaagaagactggctcgtcaagatatttaaggacaaggaactttatttggggggaaagtgaaagacacttctaaatggaaatccctaaagcacatacagcagctgacagagtggccactgtgcacatgagggctgaggagatggatggtagagtccattcctgcaacatgtctctgggtgtgtgatggttagactcctcatgcatatgaatataagagctggactcatggagaaaaaaagggccatatcccataggaaaggaagaaaaaaaaacagatgggcacccctggagagagctcattagatttggtgtgtttaagatgaaaatttcttccaaaaattgtaatgttctaagctaaatatgaatctcttcaataaactgagaataggagaatggagctaggacttgagagaggaaacaaatcttgagagagcagaaagcaaatccacaaaaactgtcacatgacagaggtcagaatggagctgatgtagctacttcactattctgcagacttattgaccatgtggagaaggggcttgaacaaatggagacgttctccaaccttctgaatcagcctccttcttatgcatgagtagaaatcatagttctgggggtgaccttcccaattttcctgtccatacctcttcccccaggggtagagtgtcttcccaaccacaatggtttctcaccagtgttctcagcttctcctccattgtacttaccctgcagattaagaatttcttctagatggagttctttgggaattttctgttttctttagtttctgttgactccaccacacccccataggatacaggttttattggatttcccctggaaatagtgggggtggatccaggcgttcaacagtcctcgctgttcttcccttcctgtcagcaccacaggacagcagataagggagttgactgtggatttttcaaattcctgggaaaagcctgcaaggactagtagattcacactctaataccattagcacatgtatccaaaaagaaacctcactaaatatttccaggttagcctgttcctctctcagtgccatccagtggcacctgccctgggttcacgaacatgtgggccccagtcctctctgctggcatctctctcctcacatttcagtcttctcgttagctctgtgaaagcagctcagatatgttaaaaggttttcttcttcatttattcagtttttcaggtttactgttaaggaggtcagaataagatcatagtttcctcatttttcacatttgcacgctgagtagccactttctatataaaagccagaaactaagggaacaaatcaaatatccatatccactacaggtgaacgttaaaaaatttgacatatgattatggactaaagtacaatgcagaattagaatcaaggcatcctcattctcataaaagcatgtctacattctcaaataactctgctgagtgaaagtagctgaagaattaagagtgcacttcataaacttctaattgtataaactgcagaaggtacaactattctaaagtaacagagcagatttgaaatttgggagaaatgggtgttgaaagtaattgggtggtgagatgaaattacagagaagtgacagaaagatttaggggttaacttaattgtacacaacctgattaaagtttgcacacatacgttaccattttccaaatggtgcagtgtagatttgaattaattattaattgtacttaaagcagtaacaaagaaacaaatgaatatgttggttgaggaggagcaaaaaatagatgggtatgaacactcaaaacatctcagactcttgaaagtacacatgcttgaacactggttttctctgtatactttaggtaaagagcagaatacattaaaagaaaacagagatgtcctggcgggggtggaatcctgcaaacctcactaggcgtgtcccacactgccctggagttgtctcaggggagcagtctcctctagtggtcagagacacaggcatggataatggggctaatactgtccagctgtgtgaccttgaacacattgtataaacactgttccatatgtaatttatcttccttaaaatgtaacattgacacttgcattaaatgtattctacaaatatgtcaaaaagaagatgacgactgctaaatgattatcaaggcacaatcatataatataatgatattttcctgagtgataagatgactaccaatctcccccagggcactttgtttgctctgagccctgcgcctcctcaggattcccatcccagagcttgctatacagtaggagacatgcaaataggtttctccctctgctgatgaaaaccagcccagtcctgaccccacagctctgggagagaagcgccagccctgggattcccaggggtttctatttggtgatcaggactaaagacagaggacccaccatggagcttgggctgagctgggttttcactgttgctgttttaaaaggtgaactagagagattgagcgtgagtggatacccttgagagaaatggtggattatgtctgggagtttctgaccaggatgtctacgagtttgcaggtgtctagtgagaggtacagctcgtggagtccggagaggacccaagacaacctgggggatccttgagactctcctgtgcagactctggattaaccttcagtagctactgaatgagctcggtttcccaggctccagggaaggggctggagtgagtagtagatatacagtgtgatggaagtcagatatgttatgcccaatctgtgaagagcaaattcaccatctccaaagaaaatgccaagaactcactgtatttgcaaatgaacagtctgagagcagagggcacagctgtgtgttactgtatgtgaggcaccaggtaagaggacatcagtgtgaacacagacacagtttcctgcaatgacaagggaggaggctgggctaaaaggggcactcaggacccactgaaaacgggcagctctagggcaggtacagatggttatcatgggctgctttccttcagggtctgtggcctcctctgcatctaccagttcccctcggagcctctggacatttatgtttctgtggccacccctgacatctctggattagaaaagtttattataggaagaggaaacattctcatttgtcccaaagcagatgtaagtaatggaagcaaaaaatgcacaggaggccaggcggggctgtagatactgtcaccccagaatgtcaatctcaccactagtactggagagggaagggagtttgatggaccttccctaacaaccctgtggtccaagataagtccaggaagaccattggtgcctcccagagcacagttgtccatcagggatgtccaatgcgtcccagcagcagccatgcctcagtgtctccactgtgcacagccactgtctgggaggagctcccaggatgggtgtctttggcacacaccaggtggcgggtgttagagtgcagtgcagcagctggctgcctgttctattgggctccctgatgctggagagatgggaggtgcattcgcagggccagcaccctgtttgtgaatttttatataaaaaccctgattttacttcatttttgcagatgacatagataactaaaaacagaatctgcaaagaaattgtaattttcaactttaccccaaattcattgtttcttaattctgtgcaagatccagacatattattgccttcctcatgataatttattctatgtaaaaccgaaatcattttttctcctactctttgtttctgttcaagtacagagatcttgagcaaagtaagttgggttctttccacacactaaccctcaccttccccagagaatgagcagagattgtcctcagtctgagtctaagggaggagctgtttctggcacaatcagagcctgcagagacccccaggtgcagcttcagtgaagtcagacatttctccatgtgggcgacctccagtgcctgtgactgctgctcaggcctaattgttggttaagtattacgacaccctttaggtgatcacatctcaagcctattctgaaaatcaccatgaacagagatagttcaatggccattctcctgacataagtttctctttattacttggttccaagtatggagaaaaatgtgaccctatatttgtctgaatccaacatcagcatccacggcattacgctaggagactcactaattgagcacaagtgagctcgttattctcatagaaatgtaagtatttggaaatttcagcgtgttctccagaacctgtggctgccaacaactgtatttctcggtgcactcttggcctggtgaagccttcacagaacctctccctcacctgtgccatctctgcattctccatcacaaccagtgtttccttctggagctgcatccatcagcgcccccatgggaggtactggagtggatcgggtgcataggtcatggagggagcacagattactcccctcttctcaagagtccagtcaccatctccagatccatgtccaaaaagtacttcttcttacaggtgaactatgtgagcaacaaacacatagccatgtattttagagcaaaagacacagtgaggaaaccacagtgtgaactcatacccaagcctccctgtgggggtgcataggacagccagggttactcaggacaccaggctccctcaggacaccaaggggcactcaagaccattgtagaggcatgcaggtagctgggggctctcaggaaccatgggggaaaatcaggacaccaaagggtgcttggtacagcagggggctcaggattattgtggggattcagaaagagcaggttcaaggctcaacctcagggcatgtgcagctggtgtgaaaaggggctggatgaggcgttttgtgtcaccatcatgtttcaccaccagacaccctccactacctctattctaatgcatgtgtttgtatgattagaaaatgatattgatataaatatataaccatagctaggtgtgtcaagttgtcctctccatcttatatcagccttgtctgtaaggactaattccccataattacttgagaacctcataaattgtggtcaattatgtaggattcctctctttttctgccttccttcctccctccttctctctctcacacagaaacttatatacagccaccccacaacacacataaatctataacttttattacctgatgtattgataagtaatctaaagttacataaaaatcagtagttcactgtcaatattgtaggagaagggaaggtctaggaaggaggaattacagaacaagaggatattttgagggtaattgacttgttatctatgtggataatgataatgtctatgaccatatttgtaaaattgaacacttcgtgtggagactattatttttttatttaaccccatgccattattttgccgtattctagcatttctctaaaaatacagaaatgttcagcactcattcatgtgtatattcaggagtttctgacttttcatgtattttatttatctctgtctaattgctttgataccaaattttacctagtataattagtactacctttagcactgattataagtctcactcctccatcatctccttttttgccacacaagctgaatctagtttggactcataggagctgcttcattcaatgccagtgggagtttcaaaccctatcaacccccctataaactgtcattaagaaagtttatcaaactccaccagtcatgtgatattagttcgttttcacagtggtataaagaactacctgagacgaggagtttacaaagaaaagaggtttagttgactcacagttctgcatggctggggaggccacaggaaacttataatcatggtggaaggtgaaggcgaagcacggcacatcacacagggcagcaggagagagagggggaagtgacacatagttttaaactatcagctcttgtgagaactcactcactatgatgagaacaacatgggaaaactgccctcatgatccaataacctctcacctggtccctcccttgacatgtggggattagaatttgagatgatatttaggtggggacacaaaacaaatctatagcacatgtccagctgtgtcctggagttgtttcagggatccagtgtgtactgttgatagaaacagtgatcatcattctagctggtgtgagatggtatctccttgtggtttagatttgcatttctctgatggccagtgatgatgagaattttttcatgtgtcttttggctgcataaatgtcttcttttgagaagcgtctgtgaaaaaaaaaaagaaacagtgacaccaagctcacaccatccgttgtagttgacaacatgcaaagccaagagatctcaactgagatttagtgtgtgtgtcatgtctgatgaagtcataagctcagagcaagtgaatatggaaaagtgtattatctgcacagtgtaggtgtctgctgagtgcagggcaggtctcgcaggaaaatctaaaatggcttgaaagaagaggaaaggagactggctcagggtttttataatggtttagtggtggtggcacagtgaggcttcccactcacagatcggggtttataaggtttgaaactcccactgccattgaatgaagaagctcctgtgagtccaaactagattcaccttgtgtggcaaaaaaggagatgatggaggagtgagccttaagtaatcaacaggcatgcaccaaaagatagagcgacaacttattctaggtagcaagaataaaaataatgaaaaagaaataagggttcagtatgggtggacaagacccagatctacagaaatgagatgactttagaaatataaggaaataataatgagaaaaagaaggaggggatggggaattagggtcctggcctaatgtcttgggtagaagcttctcacaatcaaggactatcagcttattctgcaggtcttgggtcacacgtctgcttaaaaacatcagaaatgccaggcaatcaatgaggatgctcagtttagcatctcctatttgagtagatttacagttgtgtggaattcttaattgattctttttggtttgtttttagaggcaggctctcacactgttccacagcttaaagtacagttgtgtgatcatagctcactgtaattttgagctccggactcacgtaatcttcctgtattagcctcctgaatatctagaattagaggggaacgccacccctcacctgcttattctttaaaatattttttcatagaaatagcatctctttatgttgcccaggttggcttcgatttcctggtctcatgtgatttccctcactttgcttctgaaagtggtgtgattatagggaagatccactgcatctgtcctgaattgattcttcagttgtaaaacatgaagccaataattaactgcctgactgttttgtgcagtgagttagttaaaagtttctgataagattccttccaatatgattcaagagcagtattttctgctgatgttcctttcagtttccttgttgaagatcagaagacactgcggaaaagatgtagtaaaaaggcagttttaactcttcatgattggagtggatatcacataggaatccctttccgtattttgtaacacatgcatgcaatagaacaaagatgatcccttggtgtaaaatctataaacgtatgggccttttagctaccaagtcatagggtaataactgatggaccctgaggagtgaaccatgattccatagtgctagtgggagaacccttggccaaggaagtttacattttattaaaattgataatttttatgtagcgatgccattttttaaacattcccagaaggttgtgagtgggattgactctgtcttctgtgaacaatgacagtgccctccatggttagataatattttaaactagattgagctagagtggtttctgtattgaatcactatatttttttagcttcatgttagctttttgtgtgttagcatttgctttaaaatgatattaatcagccctctagtaggtagaaattcatctgagggtttcttcccttgttgtccatctcaataggatttccagaagacgtaagaaccctctctgtttctaaaaatattccaggctgggcgctgtggctcatgcctgtaaacctagcactttgggaggccgaggtgggtggacccctcgaggttgggagtttgagaccagcctggtcagtatggtgaaacctcatctctactaaaaatacaaaaattcgccgggcatggtggtgtacactcgtaatcccagctacttgagaggctgaggtgagaggattgcttgaaccctggaggcgggggttgcagtgagccgagattgtgccactgcacttcagcctgggcgacacagcgagactccgtctcaaacaaaacgacacaaaaaattccaaagttgtgcaccctctaaaagcatatgtacttaattctcatttttaatttattaaacatctctaataagttcaatgtttcctgccttctgagttgatttcctaacacatagaagaatatatcctaaatgaaagtttgtgttcttaatacaaattactagttaataacctttacttttattattgaggtattatacatcaatgttaatcaatcctctcaatgggactcttacctaaagaatatataaaatattttcctgatcatgacatataatagatgtgaacacattcttagcattcagccatgtctcttgtctattaatattataaaccacatgctaactttgattttattggtaattgttctaatttcttttttttcccacttctctggttgttttttttttaactttaagttttagggtacatgtgcacaatgtgcaggttagttacatatgtatacatgtgccatgttggtgtgctgcacccattaactcgtcatttaacattaggtatatctcctaaagctatccctcccccctccccccaccccacaacaggccccagtgtgtgatgttccccttcctgtgtccatgtgttctcattgttcaattcccacctaggagtgagaacatgtgttgtttggttttttgtccttgcgatagtttgctgagaatgatggtttccagcttcatccatgtccctacaaaggacatgaactcatcattttttatggctgcataggattccatgatgcatatgtgccacattttcttaatccagtgtatcattgttggacatttgggttggttccaagtctttgctattgtgaatagggaattgttctaatttcaaactagttaatttttatcttcatgcagctagattattatgtgtggctatttattccgagagggataaagacaacattaacaattttcactgcaggcatgtctaggcaactccctgtgcactatgaccctggggcgttggagattctatggggactcttccctacctgcctaggagagttctctgccttctacctctagcattttcctctttgaagaagtacatctaactgtcattagaatagagacaaagacaagtcttaactgcttccagctgaggagggatgctgtttggggaagatctctcttggaggtctaagggaccccaggaaaagggagccattatcccaggcttcagttgcatgaccatttggagtttgatggtctgaaaatgagaagaggcaaatctggttattagaagacatgtatgaaaaccaaacaaggtggcaaggacagcttgaaagaaaattccaaggctgctgacattcctagataactgcagctgtagttatgcctgctaaggtttgggcgcatggggcttggcttttgtcagctccctgggatttattttcccaaacaaagaaacctccaggttaggggcaccctattcattcccatcacctggcatgatttaaaggataattgcttagaattaaaatattgatccagattttttatattccccatcgctttttgtttcttctgggctgtagccagagatcattgattggcgctcaggaataagcagagttagtctaaaatgcaggcaaatacttaaacaactgaagagattagaatttaaagacaagtgtatgatatgttttgaaatacaatgtttctctttccagttttggtttttgtcggcagcaaataatgataagactgagttgtttgcaaaataaactttagtcttaaacttggcctgattatttgcataaagtgcagcaagaatattaataataattctgtaggaaaagcctgcaagcaccaggagcttcacagtctaacactatgagcacgtgcatcctcacgcaactcactgaatatttccaagccagcctgttccgatcttaaatgccatccagtggcatctgccccaggtacactaatacatgggtcctgcttctctctgcagcctcctctctcctcagatttcaggttttgtttattgtttgttttctctctgacatcaacacagatatgttgaaggttttcttttttttatttgtagttgttcagctttgttgttaatgaggtcagaataagctcatagtttacacatttttacattcccatgccgagtagctgcttttctctatcaaatccattaactgagagaacaatcacatttcgttacaggtgaacagttaaatagtttggcatatatttctgtgctggaatctaatgcagcttgaaatcaagtcatgcctcactcattgaaaaaaacatggctaaattctcaaagaattgtgctgagtgaaagaaactaaggaattaagagtaaattttacatgatacatttgtagaaattttagaagatgccactattataaattaacatggagaagatttaaatgtttctgagaatatgctattgggagtaatggggatgtgagttaaatttcagaggaataagagaaagatttagggattaattttttcaaaccttgattgaagtgctgagtaaatggttgcaaacataggtctacatttttcaaatcattcaccataaatttgaattatttattaattacactcgaataaagcaataaagaaactgatgagataatatttgactgaattgcatcaataaatagatcgatattaacacaaggaatataactgatttccaaaaacatacacatgaaccatggttcactctgcgtatttagataaattacagaaagttgtcataacagatggggaatcctgcagacttcactaggcatgggccatgctgccctggagttgtctcaggggagctgcctcctccagaggttagagcacaggcccaggtaataggactaaatttttagatgtgttatcttagacacactgcacaactgctgtgttctctatgtaaattatctcctgtaaaatataacattgaagcctgcattaaatatattgtgtaaatatgtaagaataaaagaaagttatgagagctaagtgttaatcaaggcacaagcatataagatataactatattttcctgaatgatggaattactaccagtctcccccaggacacttcatctgccctgagcccagcctctcctcagatgtcccacccagagcttgctatatagtgggggacatgcaaatagggccctccctctactgatgaaaaccagcccagccctgaccctgcagctctgggagaggagcccagcactagaagtcggcggtgtttccattcggtgatcagcactgaacacagaggactcaccatggagtttgggctgagctgggttttcctcgttgctcttttaagaggtgattcatggagaaatagagagactgagtgtgagtgaacatgagtgagaaaaactggatttgtgtggcattttctgataacggtgtccttctgtttgcaggtgtccagtgtcaggtgcagctggtggagtctgggggaggcgtggtccagcctgggaggtccctgagactctcctgtgcagcgtctggattcaccttcagtagctatggcatgcactgggtccgccaggctccaggcaaggggctggagtgggtggcagttatatggtatgatggaagtaataaatactatgcagactccgtgaagggccgattcaccatctccagagacaattccaagaacacgctgtatctgcaaatgaacagcctgagagccgaggacacggctgtgtattactgtgcgagagacacagtgaggggaggtcattgtgcgcccagacacaaacctccctgcaggaacgctggggggaaatcagctgcagggggcgctcaggagccactgatcagagtcagccctggaggcaggtgcagatggaggctgtttcctgtcaggatgtgggactttgtcttcttctgacagttccccagggaacctcttaaatttagaaaactgtgcctaacaatgtcttctctatgcatatgaggaccttttctccctggcacaaaatgcagattgacgctgacacggatgaaaattcctcaaccatggtcacaaggatcagagtcctgagtaacctcagggcttcctggtgattcttctccaatcagacccaggacagggacctccgtgagattccctgactggaacagtctttatggatcctggtcacagacaatagagaggctgaaccagggtcagcgtcatgtagaacgtcacagatttcacgtctgatccttctcctgacacgaaagtatgcaaatcagtatcagcaccgatctggtgcttcttttgttcctaatccatttactttcttttttcgtcgtttttctcctttttccatttgtttttcctgctttttgcaaaaggaagatgttttccctgtgagatgcaggggatgacaattttgggagatggctggaacatccaatatcctcagggccgaccatcagtaagtgcaggctagaagtctcagaaagagctgaagctgcttaatcaccgtggagttttaccttctccagttctgctctgatggaatcagggccaagcaggttatcaatgataatctacctaacatagagtcaactgattccagtttcaataacgtctgttaaaaattcacaccaccacctggattactgttttgtcaaatcaatacacagtattgtccagctaagtagacccaaagacggaccgttgcccatggagaaaaacattaacctgagttctaggttcttacagtgttaaaggtgtaaaactgattattaaaaatgaggctatttttctttttgctgttgagttgtagaagtttcttttccattttgacatgaaaactttttcagatatatggcatattatccaattctgtaagttgtagttattttgttgctttgcagaatctttttcataatctattcccacttgttcaattctgcttttttttgtaggtgatttgaatgtaaaatcctgaaaaagattgctaattttttgagtgttgagagttttacaattagaggtattacagttagatatttgaggcatttggagtgaatttttgtgtttattctaacctaaaattcttaattcttttcatgggaaaatccagttttcataccaccctctttggaagacactacaatttagccatgttatattgatggttctcatgctaaaaatcagcttgtcatcaatatgtgggtttatatctaagctctatataggtatttaagccaaaactttctatgtttttaataaatgttgaggcctggaagtgaaatgcctaaagctttcttcttgccttgttacagatattgtaccaaaatattctaaccttttactattgagtgtaataatagctgtggcctttcttaacggcttttattatgttcaagttgttttcttgtcttcctactttgttcatagttttaataatgaaactgatttttttcaaagtctttttctgtgtctgatgaaatgttactgagatattttttctttagttttttaatgtgtaccaaactgattgatttgagaatgttgaatcaagtatgcatctcaggaagaaatttgagttggtcatggtgtatgtcttctaaaacactttggagcttagtttactattgttggggattaattcatgtctactaatgatattggtctgtagtttcctttattgtggtgcctttgtctattactggtaatactatcatggtagtctcatagaaagagtttagaaggtgtatggcagactacctttaaaatagattttatcagtggagaaatggtgatagttttttcttcacttttctgttgggaagaattttatgttgtttaaaagatattcagaatgacttaacctggtttatgagctttcattctattcctttcttccattctttttgaagaactgcttacctttcctatttatttttaagtttgtttttagacatatgcaatacattttgaggtgaaacctggtggaattttttccaataaattagtaaaaataaatcatttaattgactattttattcaggttgatttgtttaatatttgctaaaggccagttctttaagctatgacacataataaatcccaaatggcagtacctcattgtttacttagcttttgtacttatatttttcagaggaagaaccactactgtaaattgtaaatagccaatacataattgtattgtatgcaaatctgtgactgtttacagtgtcatctctgagaaacataaagtttatttactatatatatataaagagtttggaaggtggactccaccaatttttgaaagagttacagaagggctgctattacttctttaaatgttaaggttcattttatgatgtaacagataacctatcatggagaatgttcaatgtgttcttgagaaggatgtgtattacgtgactcttggttggaaggttctgtaaatatcattcagataaatttgttcaatagtgttgttcaagttcagaggcacattgagaattttctttctggatttgctaaacattatggtcatgaggtattaaggtcttgtgttatttttgtattgttttctatttctttatatctcttacagtttgcttaatgcagttatatttgtatttgtacacatgtgtaaaaacaaaaatcataattgctaaatgagttttatggcacagtcacattataagtaatatttttccaaatgctaccattgccactaaagtcctcctggagtctgacgtctgctctgggcactgccttcttctcaggcgtcccacactggagcttgctatagaggaggaggcatgaaaacagggccctccctctcctggtgaaatcaagcccagacctgaccctgcagctctgggagaacagccacagccctgggattcccaggggtttccatttggtaatcaggactgaacacagagaactcactatggggtgtgaattaagctgaatttttcttgttggtattttaaaaggtgactcctagggaactagagtgagtgagagtgagtggatatgagtgagagaaacagtggatatgtttgccagtttctgaccaggatgtgtgtgtattttcaggtgttcagtgtgaggtggagctgatagagtccatagaggacctgagacaacctgggaagttcctgagactctcctgtgtagcctctagattcgccttcagtagcttctgaatgagccgagttcaccagtctccaggcaaggggctggagtgagtaatagatataaaagatgatggaagtcagatacaccatgcagactctgtgaagggcagattctccatctccaaagacaatgctaagaactctctgtatctgcaaatgaacactcagagagctgaggacgtggccgtgtatggctatacataaggtcccaagtgaggaaatatcggtgtgagtccagacacaacatttcctgcaaaaagaagaaaggagtctgggccgaaggggacactcagcactcacaaaacaggtgcagccccaaggcaggtgcagatggagggagggtaagggctgctttccttcagggtctgtggtttcctctgcttctaatatttcccctctgaacctctgtatatttatgttttgtgcccaccatgaggtccctggattagaaaactaatttaaaagaggaaatattctcatatgtcccaaaaacagatgtaagttttggaggcataaaaatgcataggagccgcgtgagtctgtagacactgccaccccacaatgccagacccaaaactagtgctggagaagggtgggagtttgatggagcttccctgatgaccccgtggtccaagctaagtccagcaaggccattggtgcctcgctgagcacagttgtccatcagggatctcccatgtgtcccagcagcagccatgcctcagtatctccactgtgcacagccatcgtctgggaggagctcccaggatgggtgtctttggcacacacaggtgatgggtgttagagtgcagtgcagcagctggctgcctggtctattgggctcctggatattggagggattggaggtgcattctcaaggccagcacgctgtttgttaatttttgtataaaaaccatgtgatttaattcattttctcagatgacatagataattaataacacaatctgcaaacaattgtaattttcaactttaccccaagttcattgtttcttaattctgtgcaggatccagacatggtattgcccttctcatgagaaattgttcgacctaaactgaaaccagttgtttctcatatactttggttctccccacatgcagagatcttgattagagcaagtttggtactttccacgcactcaccctcacctccccagataaagagcagaagttctccttagactgagtctgagggaggagctgttcctgtaccactcagggcctgcggagacccccaggtgcagcttcactgagtcaggtgtttcactccctgtgattgctgctcaggtctaattgtgggctcagaattaggacagtcttcaggttatcacagatcaatcatattctaaaaatcatcattatcacacaccgtggtaataattcaatgttcatttttctaaacagcagtttctcttttttatttggttgcaagtttgaggaaaggagcatgtgataatactttttaatctaacctcaaaatctactgaattgttctaggagactcacaaattggacaagagtgagctccttgtgctcataaaaaatgcatgtatttgggaatttcaccgtgttgtccagaaactgttaacatcaacaactgtgttttccagtgcacttctggcttgagacatcctcacagaccctctccctcacctgcactgtctctggattccccatcataaccagtgtgtcctgctagaattgtatctgcttgcccctagaagatggacaggagtggatcaggttcatgggttgtaaagggagcaaaaattacatcccacttctcaagagtccatatccagatccaagaaacagttcttacagctgagctctgtgcccagtgaacacacaactacacattttgaagcaaaagacgcaatgaagggccttcattgtgagcctagacacaaacctccctgcaggggtgaataggagcagcagggggcattcggggcagtatgggggcttagcatgattgttgggggtcaagatgagcaggatcaaggctcatcatcagggcaagtgcaacagggcagaaaaggggctgtagatgtgggttgttctcaccatcatatttcaccaccagacaccctccactacatctcttctaatgtgtctgagtgttgatatgattagaaaatggcatttatgtaaatactaatgtatacccaaatggaggtgcatccagttgtcctctccatcttatgtggaccttgtccatcaagggctaagttcctgtatttacttgattacctcatacattatggtcaaaacaggtagggtctcattttggcatggtctctcctcctcccttctctctgtcgcacaaaaacacatgaactgacacacacagagcttcccaacttcaattatctgatgtattgaagcaaattgattagtgtgcagcttttctgctttgcctgctattcatgttatgtaaaaataagaaccgtgtgtttctcagcttgttacttctctaagctaagtagcatctttgtttattatacccagagaccaaaagcgattcagctgttattcagcagcttaactggtaaacaaattgtggaaaattcatttactggaataatacccactgttacaatgaagtactgctggatacactcagtaccatgcttaaaataacaagtacctgaataagtaaaataagtcaaacaaataaaagtgcatacatatgattccacttctataatttctataaagtaaaaatgaacttaaagttacataaaaagatctgtagttgactggggacatggtacaagaagagaaggtatagaaaggagaaacgacaggagagcaaaaggaaatttctaggataattttttctctgttagtaaaagtgaggattatgtcactatttgtaaaattgtccactttatgtaaaggttcttatttgctaatttcacctcattaaaatattgcaaattttaaaatatctaatttggtagaaaaggtagtagagagagatgaataaaatacataaaattcagagagtcctgaatacacacatgaatggaccctgggtctcactgtacttttagggagacactagaatacaaaaacataatgacaggatttcagtacatgaaaggagcttctcagaccccaggaggcctgtccaactgcgtctgggagttaactcagggagcaggcatgtcctttggaaggagcaatgacaccaagctcccagcatccattgtagccgacaccatgccaatgccaagagatctcgactaaaattttctgtggatgttgagtgtgattatgccacacactcacaccaagtgagtatggaaaggatagttacctgcatccttaaggtgtctgctgagagcagggcaggtctctcattaaggtccaaagtggcttgatagagcagggaaggagactggctctgggttgttatcatggcttggtggggagcggggcagagcatcctacttgcaggaagggttttgtggggtttcaaggtcaaattggcatcaaatgagggagctcctgtgatttctaactagatttaccttgtatgcttaaaaaaagagatgatggaggaatgagcctgaagttatcagcagtcaggcctaaacacagagtctgatgacttactctaaatagcaagtatacaaatgatgagtaagaaaagagacaagactccaatatgggtggacaacagccaggtctgcagaaaatgagaagactgtttataagcaaagaataatgagtaggatatggaggaggattctggtccaatgtcttgtgtggaagcttctcatgatttgagatcatcagcttattctgaaggtcttaggtcacctgtcttcttcaaaatatcagaagtgcctgatgatatgtgaggatgcacagtttaacttcctctatttgagtagctttacaattgtgtagagttcttaattaattaattttttttttggagacggagtctcactctgttgtgcaggttggactgcagtggtgtgatcataacatagctcacggtgatttcaaattcctggctcatagaatcctcccacctcaacctcctgactagcaagtagctaggtttccagggcccttcatctacacttggccggttcttttcattctttttttttttttttaggtggagtttccctcttcttgcccagactggagtgcaatggtgccatctcagctcactgcaatctccccctcccaggttcaggtgattctcctacctcagcctccagagtagctgggatcacaggcatgtgacaccatgccccgctaatcttgtatttttatcagagatgacatttctccatattggtcaggctggtctcaaactccctacctcaggtgatctttccacctcagcctcccaaagtgctgggattacaggcgtgaggcaccgcaactggcctcttcatttttattcatatgttccttcagcagccactatgtcttcccactgatttcttcagtttctgccttttccttttgaataaggcattattcctaagggaagtcgggaggtgggcctggacagggacttggtgcattcctctctcccgtcccagttcttattggtttctccagtggctgtagaacagcagttttgatggctttacctctgcagataatttctcttgcaatgtagtgctgatggggaggtgtgtctggatgcacttcacctatagttgctgttttgctttcccagacagcaccatcccaaggggtagagggtggagcattttgtgatgtatccccagtactgaagaaaaaggcttcaatagcaggaggaattcctcaactgtatacactctgagaatttaaacaataacttctctatcatactcaaattgaaaccatccaatgaatatgtctactttaatcgtgtgctaacttaaatggcatttggcagcctctgtgccagaaaagattatcatctgctcctgtttatttccctgcaagtccttatctctcttcagatttcagatatattgtttgtcctataacatcaaaaatttgatgtatatgtgctaatttgcagatcagtaagtttagtagctgttgtaagaataataacatatttttatggggtgcttacatctccaagctgagaagcacctctatgtgtaatactaagaaactagaaatgatacaaatatcaagaagatacatagataaaaagtaatggcatgctaatttactgtaataacatccatcatgagaatcaatacattgttgatgctcaacatgtttgcatcataagtagttatgtgcgagaagccacacaaatagaacacatactatataattcctgtataattcttgaaactcaaaactaaagcattaaatatgaaggactgactcagaatatggtggggaagaaaatatttgggaaggaggaattgtagaggaacacaaggaaacttttaagtgtaatttgtttgttcattatttggatggcttttggggatgcaaaggtgagcacgagtggaataacattttgttttgtttgtttgtttgtttttctgaagagatgtggtccttctctgtgacccaggctggagtgtagtggtgggatcatagttcaatgtagcctctaacttctggtctccaacaatactcctgcatctgccatctaagtagctggaactaccgttgtgtgccaggaggtttggcttggcttgagtacttattaaaccacacactttttgcaatatttaatgtatagtaataatgtctcaataagactattacaaatcaatgaatgaataatttgttcagtacagattcatggaaaaatagacactaacatgatgagtgtctgacatttatgaaaatacagctgcatgaaatgtgcttctctttacattcattaggtaaacacaatagtgcatacacatcacaccgtgctttcattacaggaagaaagttctgaaaatgtcactggggtgaaccacacggtgctgggcttggttcagggagcagtcaggcccagtgttgtgaccttcaaccacagaatccttaaaaaaaaaaaaaaaaaaaaaaagaggctgcctcaaagtccgcatcagttcccggactcgctatgtttctggatcgtatcagtgcatccggatctccctggtggctttagtgattccttgcttgccatgctgaggtctcgctgtagattatgttgggttttctaagaccgttttgctattgtaagatccactccctgggacagagcgattccctctaaacctgatagaggttctgaactaaaaataacattaagtgaatcctggtgtgtctgaactcaagtgattgttacattaagctgctgttccaatctgtttcctcacctgggaaaagaggagccaggacatagtgagttgaggccccaggaagataactgaattctcagagggcacagccagcatcctcctcccagggagagtctaaaagactggggcctccctcatcccttttcacctgtccatacagaggcaccacccacatgcaaatctcacttaggcacccacagaaaaccaccacacatttccttaaattcagggtcctgctcacatgggaaatactttctgagagtcctggacctcctgtgcaagaacatgaaacacctgtggttcttcctcctgctggtggcagctcccagatgtgagtgtctcaaggctgcagacatggagatatgggaggtgcctctgatcccagggctcactgtgtgtctctctgttcacaggggtcctgtcccaggtgcagctgcaggagtcgggcccaggactggtgaagccttcacagaccctgtccctcacctgcactgtctctggtggctccatcagcagtggtggttactactggagctggatccgccagcacccagggaagggcctggagtggattgggtacatctattacagtgggagcacctactacaacccgtccctcaagagtcgagttaccatatcagtagacacgtctaagaaccagttctccctgaagctgagctctgtgactgccgcggacacggccgtgtattactgtgcgagagacacaatgaggggaggtgagtgtgagcccagacacaaacctccctgcagggaggcggagggggcgggcgcaggtgctgctcaggaccagcagggggcgcgcggggcccacagagcatgaggccgggtcaggagcaggtgcagggagggcggggcttcctcatcagctcagtgctctccctcctcgccagcacctcagctgtccccaggcctcctctttctttattatctgtggttctgcttcctcacatccttgtggtaggaaaggaaggaggaaggcaaattttcctcttacagtcaaagtgtcactaattactaggaactttcctacaagttcctgaatgtcccatttttccttcttaattaaaaaaaatatatattctaatacttctcaccatctcttgatttgtgtcatcagttgaattgtgctgtctttgaaattcaaatgctgaaaccttaaatccaattgatctatattggaattttaaggatggaattaaggttaaatgtgatcataagtctgagattctaatgcaatagatctgttgtctttataagaagtggaagagtcaccagagacctctcacttttcccgtgcacgcagagaagaggccatgtggagacatagtggactagaaggtgcaagccaagaagaagccgcaccaagaaccaaccctgccagcacctggaccttggacattcagacttcagaatggtgagaaaatcaatgtttgttgtttaagccacccactcctgttgtcttcttatgaagacccagacagactaataccacataactctgttagctcctggagggagaagcagctccctgaggctgggcacatctctcagatatccatatgaagtaggcagaaatagtagttctcatataaaaatgtgtcatggccctgttggccatttttttttgacggagtctcgctctgtggccaggctggagtgcagtggtgcaatctcagctgactacaaaccccgtctcctgggttcaggcaattctccttcctcaacctcctgagcagctgggactacaggtgtccaccaccatgccagcctattttttttttgtatttttagcagagacagggtttcactgtgttagggtggtctcaaatctcctcactgcatgatctgcctgcctcggtttcccaaagtgttgggattacaagtgtgagccaccgcacctggcccctgttggccattcttggggcaatgtctctgaaaccagccctggtgcctgtaccacaaaattttcttttatctttcatgtggatataacaaatggacaatgaggaccagctgcatggagactgaccactgaacatcttctgctgtctcctaagtaagtcacaggaaaacacaccaacatcaccaacataactgttttccttcaacttcctcgaacgaactatagaaatgatcccttaaagtatagtctattccttcaactttctcaatttgcactgaatcccttcctaaattaggagctacatagggtctgagttttgttccctttctcccagtcttccccaagtatcaaggacagaatagatttaaattaaatttggccgtccatgcccccaacaccacatcggtttctaacatccttgtcatgtacccatccttctgtgggcaccccacatcaggttggccaggaatggccagaaggtgtcatcaccttatgggctgaggctacaagttatacacacgtgtgatttcagtcacacacactctactgcaggacacacctgtgttctgaggaactcaggcgcctgctgatctcaggtcttctctaataaattacacacctcttatgaatgaaggtccagatggccccatcagctgcagagcagtggattaaagctcatgggtgggtcagtcaggcagaagtcagacaatgggataatagaagtcagacaatagtcactgaggttcccaatgtattttaatggaataaaacaatattagcaacaaaggggcagtaaagaagactggctcttgaaggtatttaaggaccaggaactttatttggggggaaagtgagagacacttttacatggaaagccctaaagcacatacagcagctgacagagtggccactgtgcacatgagggctgaggagacggatgataggttacgttgctccaagatgtccctgggtgtgtgatggttggactcctcatgcatatgaaaataagagctggactcagggagaaacaagggccataccccatagaaaaggaagaaaaaaagcagatgggcacccctggagagagctcattagatttggtaggtttgagatgaaaattacttccaaaggttttaatgttctaagctaaatatgaatctcttcaataaagtgagaattaaaagaagaatggagctaggagttgagagaggaaacaaattatgagagagcagaaagcaaatccacccaaactgtcacatgacagaggccagaatggagctgatgcagctacttcactattctgcagacctagttgaccatgtggagaaggggttcgaacaaacggggatgttctccaaccttccaaaacaacctccttcttatgcatatgcagtaatcatgattctcagggtggccttcccaagtttcctgttcttacctcttcccccaggggtagagtgtcttttccaacccacagtggtttctctgccatgtcctcagcttctcctccattgtacttaacctgaagattaaggatttcatctggatggagtttcctgggaatcctctgttttctttggtttctgatgaccacatcacaggccataggacacaggttttagtggatttcccctggagacagtggaggtgaatccaggcgttccacagtccttaccgttcttctcttcctgtcagcaccgcaggacagcagataagggagctgactgtggatttttcagatccccgggaaaaagcctgcaaggactaatagtttcacatctaacaccattagcacatgcatccaaaattaaaaaaaaaatcctcactaaatatttccaggttagcctgttcctctctcaataccataccgtggcacctgccctgggttcggtaacatgtgggccccagtcctctctgtaggcgtctgcctcctcagatttcagtcctcttttttgctccgtgaaagcaactcagatatgttaaaaggttttcttcttcatttattcataatttttcaggtttgttgttaatgaggaaagagtaagatcatggtttcctcatttttcacattcccatactgagtaactgctctctctctatgaaagccagaaattaagagaacaactcaagtatccatatccattacaagtgaatgttagacaatttgatgtatgattatgaactaaagtacaacacaggattagaatccaggcatcctcattctcataaaatcatggctgcattcacaaataactgtgctgagtgaaagtagctaacaaattaacagtgcacttcataaacttctatttgtataaactgcagaaggtacagctattctaaagcaacagagaagattacatattggtgggaactgggttttgaaagtaatggggtggtgagatgaaattacagagaagtgacacaaagatttaggtgtgaattgtacacaaattaattgaagctctgattaaagggttgcacacatgttaccattttccaaattatgcagtatatatttgaattaattattaattgtatttaaataaagcagtaacaaagaaacaaatgaatacatttattgaggtggagccaaaactaaatgggaatgaacactcgaaacatctctgactcttgaaaatacacaagcgtgaacactggttctctctatgtatttcaggtcaatagcagaatacactaaaagaaaacagagatgtcctggcaggggtggaatcctgcagacctcactaggcatgtctcacactgccctggagttgtctcaggggagcagtctcctctagtggtcagaggcacaggccgagataatggggctaactctgtccagctgtgtgaccttgaatgcattgtataaacactctgttctctgtgtgatttatcttccttaaaatgtgacattgacacttgcattaaatgtattctacaaatatgtcaaaaagatgatgactgctaaatgattatcaaggcacaatcatataatataatgatattttcctgagtgataagatgactaccaatctcccccagggcactttgtctgctctgagccctgcacctcctcaggattcccatcccagagcttgctatacagtaggagacatgcaaataggtttctccctctgctgatgaaaaccagcccagtcctgaccgcacagctctgggagagaagcgccagccctgggattcccaggggtttctatttggtgatcaggactaaagacagaggacccaccatggagcttgggctgagctgggttttcactgttgctgttttaaaaggtgaactagagagattgagcgtgagtggatacccttgagagaaatggtggattatgtctgggagtttctgaccaggatgtctacgagtttgcaggtgtctagtgagaggtacagctcgtggagtccggagaggacccaagacaacctgggggatccctgagactctcctgtgcagactctggattaaccttcagtagctactgaaggaactcggtttcccaggctccagggaaggggctggagtgagtagtagatatacagtgtgatggaagtcagatatgttatgcataatctttgaagagcaaattcaccatctccaaagaaaatgccaagaactcactgtatttgctaatgaacagtctgagagcagcgggcacagctgtgtgttactgtatgtgaggcaccaggtaagaagacatcagtgtgaacacagacacagtttcctgcaatgataagggaggaggctgggctaaaaggggcactcaggacccactgaaaacgggcagctctagggcaggtacagatggttatcatgggctgctttccttcggggtctgtggcttcctctgcatctaccagttcccctcggagcctctggacatttatgtttctgtggccacccctgacatctctggattagaaaagtttattataggaagaggaaacattttcatttgtcccaaagcagatgtaagtaatggaagcaaaaaatgcacaggaggccaggtggggctgtagatactgtcaccccagaatgtcaatctcaccactagtactggagaggcatgggagtttgatggagcttccctaacaactctgtcttccaagataagtccagcaagaccattggtgcctcccagagcacagttgtccatcagggatgtccaatgcttcccagcagcagccatgcctcagtgtctccactgtgcacagccactgtctgggaggagctcccaggatgggtgtctttggcacacaccaggtggcgggtgttaagagtgcagtgcagcagctggctgcctggtctattgggcctgatgctggagagatgggaggtgcattcttggggccagcatgctgtttgtgaatttttatataaaaactctgattttacttcattttcgcagatgacatagataactaaaaacagaatctgcaaagaaattgtaattttcaactttaccccaaattcattgtttcttaattctgtgcaagatccagacatattattgccttcctcatgataatttattctatgtaaaaccgaaatcattttttctcctactctttgtttctgttcaagtacagagatcttgagcaaagtaagttgggttctttccacacactaaccctcaccttccccagagaatgagcagagattgtcctcagtctgagtctaagggaggagctgtttctgcacaactcagagcctgcagagacccccaggtgcagcttcagtgagtcagacatttctccatgtgggcgacctccagtgcctgtgactgctgctcaggcctaattgttggttaagcattaggacactctttaggtgatcacatctcaagcctattctgaaaatcaccatgatcagagatagttcaatggccattctcctaacataagtttctctttattacttggttccaagtatggagaaaaatgtgaccctatatttgtctgaatccaacatcagcatcaactgcattatgctaggagactcactaattgagcacaagtgagctcgttattctcatagaaatgtaagtatttggaaatttcagtgtgttctccagaacctgtggctgccaacaactgtatttctcggtgcactcttggcctggtgaagccttcacagaacctctccctcacctgtgccatctctgcattctccatcacaaccagtgtttcctgctggagctgcatccatcagcgcccccatgggaggtactggagtggatcgggtgcataggtcatggagggagcacaaattactcccctcttctcaagagtccagtcaccatctccagatccatgtccaaaaagtagttcttcttacagctgaactatgtgaggaacaaacacatagccatgtattttagagcaaaagacacagtgaggaaaccacagtgtgaactcatacccaagcctccctgtgggggtgcataggacagccagggttactcaggacaccaggctccctcaggacaccaaggggcactcaagaccattgtagaggcatgcaggtagctgggggctctcaggaaccatgggggaaaatcaggacaccaatgggtgcttggtacagcggggggctcaggattattgtggcgattcagaaagagcaggtccaaggctcaacctcagggcatgtgcagctggtgtgaaaaggagctggatgaggcgttttgtgtcaccatcatgtttcaccaccagacaccctccactacctctattctaatgcatgtgtttgtatgattagaaaatgatattgatataaatatataaccatagctaggtgtgtcaagttgtcctctccatcttatatcagccttgtctgtaaggactaattccccataattacttgagaacctcataaattgtggtcaattatgtaggattcctctctttttctgccttccttcctccctccttctctctctcacacagaaacttatatacagccaccccacaacacacataaatctataacttttattacctgatgtattgataagtaatctaaagttacataaaaatcagtagttcactgtcaatattgtaggagaagggaaggtctaggaaggaggaattacagaacaagaggatattttgagggtaattgacttgttatctatgtggataatgataatgtctgtgaccatatttgtaaaattgaacacttcgtgtggagactattatttttttatttaaccccatgccattattttgccgtattctagcatttctctaaaaatacagaaatgttcagcactcattcatgtgtatattcaggagtttctgacttttcatgtattttatttatctctgtctaattgctttgataccaaattttacctagtataattagtactacctttagcactgattataagtctcactcctccatcatctccttttttgccacacaagctgaatctagtttggactcataggagctgcttcattcaatgccagtggttgtttcaaaccctatcaacccccctacaaactgtcattaagaaagtttatcaaactccaccagtcatgtgatattagttcgttttcacagtggtataaagaactacctgagacgaggagtttacaaagaaaagaggtttagttgactcacagtgctgcatggctagggaggccacaggaaacttataatcatggtggaaggtgaaggcgaagcacggcacatcacacagcgcagcaggagagagagggggaagtgacacatacttttaaactatcagctcttgtgagaagtcactcactatgatgagaacaacatgggaaaactgccctcatgatccaataacctctcacctggtccctcccttgacatgtggggattagaatttgagatgatatttaggtggggacacaaaacaaatctatagcacatgtccagctgtgtcctggagttgtttcagggatccagtgtgtactgttgatagaaacagtgatcatcattctagctggtgtgagatggtatctccttgtggtttagatttgcatttctctgatggccagtgatgatgagaattttttcatgtgtcttttggctgcataaatgtcttcttttgagaagcgtctgtgaaaaaaaaaaagaaacagtgacaccaagctcacaccatccgttgtagttgacaacatgcaaagccaagagatctcaactgagatttagtgtgtgtgtcatgtctgatgaagtcataagctcagagcaagtgaatatggaaaagtgtattatctgcacagtgtaggtgtctgctgagtgcagggcaggtctcacaggaaaatctaaaatggcttgaaagaagaggaaaggagactggctcagggtttttataatggtttagtggtggcggcagagtgaggcttcccactcacagatcggggtttataaggtttgaaactcccactgccattgaatgaagaagctcctgtgagtccaaactagattcaccttgtgtggcaaaaaaggagatgatggaggagtgagccttaagtaatcaacaggcatgcaccaaaagatagagtgacaacttattctaggtagcaagaataaaaataatgaaaaagaaataagggttcagtatcgatggacaagacccagatctacagaaatgagatgactttagaaatataaggaaataataatgagagaaagaaggaggggatggggaattagggtcctggccgaatgtcttgggtagaagcttctcacaatcaaggactatcagcttattctgcaggtcttaggtcacacgtctgcttaaaaacatcagaaatgccaggcaatcaatgaggatgctcagtttagcatctcctatttgagtagatttacagttgtgtggaattcttaattgattctttttggtttgtttttagaggcaggctctcacactgttccacagcttaaagtacagttgtgtgatcatagctcactgtaattttgacctccagactcacgtaatcttcctgtatcagcctcctgagtatctagaattagaggggaatgccacccctcacctgcttattctttaaaatattttttcatagaaatagcatctctttatgttgcccaggttggcttcgatttcctggtctcatgtgatttccctcactttgcttctgaaagtggtgtgattatagggaagatccactgcatctgtcctgaattgattctttacttgtaaaacatgaagccaataattaactgcctgactgttttgtgcagtgagttagttaaaagtttctgataagattccttccaatatgattcaagagcagtattttctgccgatattcctttcagtttccttgttgaagatcagaagacactgcggaaaagatgtagtaaaaaggcagttttaactcttcatgattggagtggatatcacataggaatccctttccgtattttgtaacacatgcatgcaatagaacaaagatgatcccttggtgtaaaatctataaacgtatgggccttttagctaccaagtcatagggtaataactgatggaccctgaggagtgaaccatgattccatagtgctagtgggagaacccttggccaaggaagttcacattttattaaaattgataatttttatgtagggatgccattttttaaacattcccagaaggttgtgagtgggattgactctgtcttctgtgaacaatgacagtgccctccatggttagataatattttaaactagattgagctagaatggttgctgtattgaatcactatatttttttagcttcatgttagctttttgtgtgttagcatttgctttaaaatgatattaatcagccctctagtaggtagaaattcatctgagggtttcttcccttgttgtccatctcaataggatttccagaagacgtaagaaccctctctgtttctaaaaatattccaggctgggcgctgtggctcatgcctgtaaacccagcactttgggaggccgaggtgggtggacccctcgaggttgggagtttgagaccagcctggtcagtatggtgaaacctcatttctactaaaaatacaaaaattcgccgggcatggtggtgtacactcgtaatcccagctacttgagaggctgaagtgagaggattgcttgaaccctggaggcgggggtcgcagtgagccgagattgtgccactgcacttcagcctgggcgacacagcgagactccgtctcaaacaaaacgacacaaaaaattccaaagttgtgcaccctctaaaagcatacgtacttaattctcatttttaatttattaaacatctctaataagttcaatgtttcctgccttctgagttgatttcctaacacatagaagaatatatcctaaatgaaagtttgtgttcttaatagaaattactagttaataacctttacttttattattgaggtattatacatcaatgttaatcctctcaatgggactcttacctaaagaatatataaaatattttcctgatcatgacataaagtagatgtgaacacattcttagcattcagccatgtctcttgtctattaatattataaaccacatgctaactttgattttattggtaattgttctaatttctttttttttcccacttctctggttgtttttttttttaactttaagttttagggtacatgtgcacaatgtgcaggttagttagatatgtatacatgtgccatgttggtgtgctgcacccattaactcgtcatttaatattaggtatatctcctaatgctatccctcccccctcccctcaccccacaacaggccccggtgtgtgatgttccccttcctgtgtccatgtgttctcattgttcaattcccacctaggactgagaacatgtggtgtttggttttttgtccttgcgatagtttgctgagaatgatggtttccagcttcatccatgtccctacaaaggacatgaactcatcattttttatggctgcataggattccatggtgcatatgtgccacattttcttaatccagtgtatcattgttggacatttgggttggttccaagtctttgctattgtgaatagggaattgttctaatttcaaactagttaatttttatcttcatgcagctagattattatgtgtggctatttattccgagagtgataaagacaacattaacaattttcactgcaggcatgtctaggcaactccctgtgcactatgaccctggggcgttggagattctatggggactcttccctacctgcctaggagagttctctgccttctacctctagcattttcctctttgaagaagtacatctaactgtcattagaatagagacaaagacaagtcttaactgcttccagctgaggagggatgctgtttggggaagatctctcttggaggtctaagggaccccaggaaaagggagccattatcccaggcttcagttgcatgaccatttggagtttgatggtctgaaaatgagaagaggcaaatctggttattagaagacatgtatgaaaaccaaacaaggtggcaaggacagcttgaaagaaaattccaaggctgctgacattcctagataactgcagctgtagttatgcctgctaaggtttgggcgcatggggcttggcttttgtcagctccctgggatttattttcccaaacaaagaaacctccaggttaggggcaccctattcattcccatcacctggcatgatttaaaggataattgcttagaattaaaatattgatccagattttttatattccccatcgctttttgtttcttctgggctgtagccagagatcattgattggcgctcaggaataagcagagttagtctaaaatgcaggcaaatacttaaacaactgaagagattagaatttaaagacaagtgtatgatatgttttgaaatacaatgtttctctttccagttttggtttttgtcagcagcaaataatgataagactgagttgtttgcaaaataaactttagtcttaaacttggcctgattatttgcataaagtgcagcaagaatattaataataattctgtaggaaaagcctgcaagcaccaggagcttcacagtctaacactatgagcacgtgcatcctcacgcaactcactgaatatgtccaagtcagcctgttccgatcttaaatgccatccagtggcatctgccccaggtacactaatacatgggtcctgcttctctctgcagccgcctctctcctcagatttcaggttttgtgtattgtttgttttctctctgacatcaacacagatatgttgaaggttttcttttttttatttgtagttgttcagctttgttgttaatgaggtcagaataagctcatagtttacacatttttacattcccatgccgagtagctgcttttctctatcaaatccattaactgagagaacaatcacatttcgttacaggtgaacagttaaatagtttggcatatatttctgtgctggaatctaatgcagcttgaaatcaagtcatgcctcactcattgaaaaaaacatggctaaattctcaaagaattgtgctgagtgaaagaaactaaggaatgaagagtaaattttatatgatacatttgtagaaattttagaagatgccactattataaattaacatggagaagatttaaatgtttctgagaatatgctattgggagtaatggggatgtgagttaaatttcagaggaataagagaaagatttagggattaatttattcaaaccttgattgaagtgctgagtaaatggttgcaaacataggtctacatttttcaaatcattcaccataaatttgaattatttattaattacactcgaataaagcaataaagaaactgatgagataatatttgactgaattgcagcaataaatagatcgatattaacacaaggaatataactgacttccaaaaacatacacatgaaccgtggttcactctgcgtatttaggtaaataacagaaagttgtcataacagatggggaatcctgcagacttcactaggcatgggccatgctgccctggagttgtctcaggggagctgcctcctccagaggttagagcacaggcccaggtaataggactaaatttttagatgtgttatcttagacacactgcacaactgctgtgttctctatgtaaattatctcctgtaaaatataacattgaagcctgcattaaatatattgtgtaaatatgtaagaataaaagaaagttatgagagctaagtgttaatcaaggcacaagcatataagatataactatattttcctgaatgatggaattactaccagtctcccccaggacacttcatctgccctgagcccagcctctcctcagatgtcccacccagagcttgctatatagtgggggacatgcaaatagggccctccctctactgatgaaaaccagcccagccctgaccctgcagctctgggagaggagcccagcactagaagtcggcggtgtttccattcggtgatcagcactgaacacagaggactcaccatggagtttgggctgagctgggttttcctcgttgctcttttaagaggtgattcatggagaaatagagagactgagtgtgagtgaacatgagtgagaaaaactggatttgtgtggcattttctgataacggtgtccttctgtttgcaggtgtccagtgtcaggtgcagctggtggagtctgggggaggcgtggtccagcctgggaggtccctgagactctcctgtgcagcctctggattcaccttcagtagctatggcatgcactgggtccgccaggctccaggcaaggggctggagtgggtggcagttatatcatatgatggaagtaataaatactatgcagactccgtgaagggccgattcaccatctccagagacaattccaagaacacgctgtatctgcaaatgaacagcctgagagctgaggacacggctgtgtattactgtgcgaaagacacagtgaggggaagtcattgtgcgcccagacacaaacctccctgcaggaacgctggcgggaaatcagcggcagggggcgctcaggagccactgatcagagtcagccctggaggcaggtgcagatggaggctgtttcctgtcaggatgtgggactttgtcttcttctgacagttccccagggaacctcttaaatttagaaaactgtgcctaacaatgtcttctctatgcatatgaggaccttttctccctggcacaaaatgcagattgacgctgacacggatgaaaattcctcaaccatggtcacaaggatcagagtcctgagtaacctcagggcttcctggtgagtcttctccaatcagacccaggacagggacctccgtgagattccctgactggaacagtctttatggatcctggtcacagacaatagagaggctgaaccagggtcagcgtcatgtagaacctcacagatttcacgtctgatccttctcctgacacgaaagtatgcaaatcagtatcagcaccgatctggtgcttcttttgttcctaatccatttactttattttttcgtcgtttttctcctttttccatttgtttttcctgctttttgcaaaaggaagatgttttccctgtgagatgcaggggatgacaattttgggagatggctggaacatccaatatcctcagggccggccatcagtaagtgcaggctggaagtctcagaaagagctgaagctgcttaatcaccgtggagttttaccttctccagttctgctctgatggaatcagggccaagcaggttatcaatgataatctacctaacatagagtcaaccgattccagtttcaataacgtctgttaaaaattcacaccaccacctggattagtgttttgtcaaatcaatacacagtattgtccagctaagtagacccaaagacggaccgttgcccatggagaaaaacattaacctgagttctaggttcttacagtgttaaaggtgtaaaactgattattaaaaatgaggctatttttctttttgctgttgagttgtagaagtttcttttccatttggacattaaaactttttgagatatatggcatattatccaattctgtaagttgtagttacttggttgctttgcagaatctttttcataatctattcccacttgttcaattctgctttttttttgtaggtgatttgaatgtaaaatccagaaaaagattgctaattttttgagggttgagagttttacaattacaggtattaaagttagatatttgaggcatttggagtgaatttttgtgtttattctaacctaaaattcttaattcttttcatgggaaaatccagttttcataccaccctctttggaagacactacaatttagccatgttatattgatggttctcatgctaaaaatcagctcgtcatcaatatgtgggtttatatctaagctctgtataggtatttatgccaaaactttctatgtttttaacaaatgttaaggcctggaagtgaaatgcctaaagctttcttcttgccttgttacagatattggaccaaaatattctaaccttttactattgagtgtaataatagctgtggcctttcttaacggcttttattatgttcaagttgttttcttgtcttcctactttgttcatagtttttataatgaaactgatttttttcaaagtctttttctgtgtctgatgaaatgttactgaggtattttttctttagttttttaatgtggtgtaccaaattggttgatttgagaatgttgaatcaagtatgcatctcaggaagaaatttgagttggtcatggtgtatgtcttctaaaacactttggagcttagtttactattgttggggattaattcatgtctactaatgatattggtctgtagttttcttttattgtggtgcctttgtctattactggtaatactatcatggtagcctcatagaaagagtttagaagatatatggcagactacctttaaaatagattttatcagtggagaaatggtgatagttttttcttcacttttctgttgggaagaattttatgttgtttaaaagatattcagaatgacttaacctggtttatgagctttcattctattcctttcttccattctttttgaagaactgcttaccttttccttttaatttttaagtttgtttttagacatatgcaatacattttgaggtgaaacctggtggaattttttctaataaattagaaaaaaataaatcatttaattgactattttattcaggttgatttgtttaatatttgctaaaggccagttctttaagctatgacacataataaatcccaaatggcagtacctcattgtttacttagcttttgtacttatatttctcagaggaagaaccactactgtaaattgtaaatagccaatacataattgtattgtatgcaaatctgtgactgtttacagtgtcatctctgagaaacataaagtttatttactatatatatataaagagtttggaaggtggactcctcaccaatttttgaaagagttacagaagggctggcattacttctttaaatgttaaggttcattttatgatgtgacatataacccatcatggagaatgttcaatgtgttcttgagaaggatgtgtattacgtgactcttggttggaaggttctgtaaatatcattcagataaatttgttcaatagtgttgttcaagttcagaggcacattaggaattttctttccggatttgctatacattatggtcatgaggtattaaggtcttgtgttatttttgtattgttttctatttctttatatctcttacagtttgcttaatgcagttatatttgtatttgtacacatgtgtaaaaacaaaaatcataattgctaaatgagttttatggcacagtcacattataagtaatatttttccaaatgctaccattgccactaaactcctcctggagtctgacgtctgctttgggcactgccttcttctcaggcatcccacactggagcttgctatagaggaggagggagggcccctctcctggtgaaaacaagcccagacctgaccctgcagctctgggagaagagccacagccctgggattcccaggggtttccatttggtaatcaggactgaacacagagaactcactatggggtgtgaattaagctgaatttttcttgttggtattttaaaaggtaactcatagggaactagagtgagtgagagtgagtggatatgagtgagagaaacagtggatatgtttgccagtttctgaccaggatttgtttgtattttcaggtgttcagtgtgaggtggagctgatagagcccacagaggacctgagacaacctgggaagttcctgagactctcctgtgtagcctctagattcgccttcagtagcttctgaatgagcccagttcaccagtctgcaggcaaggggctggagtgagtaatagatataaaagatgatggaagtcagatacaccatgcagactctgtgaagggcagattctccatctccaaagacaatgctaagaactctctgtatctgcaaatgaacagtcagagaactgaggacatggctgtgtatggctgtacataaggttccaagtgaggaaacatcggtgtgagtccagacacaaaatttcctgcaaaaagaagaaaggagtctgggccaaaggggacactcagcactcacaaaacaggtgcagccccaaggcaggtgcagatggagggagggtaagggctgctttccttcaggatctgtggtttcctctgcttctaatatttcccctctgagcctctgtacatttatattttgtgcccaccatgaggtcgctggattagaaaactaatttgaaagaggaaatattctcatatgtcctaaaaacagatgtaagtattggaggcataaaaatgcataggagccgggtgtgtctgtagacactgccacccccaatgccagacccacaactagtgctggagaagggtgggagtttgatggagcttccctgatgaccccgtggtccaagctaagtccagcaaggccattggtgcctcgctgagcacagttgtccatcagggatctcccatgtgtcccagcagcagccatgcctcaatctctccactgtgcacagccattgtctgggaggagctcccaggatgggtgtctttggcacacacagttgatgggtgttagagtgcagtgcagcagctggctgcctggtctattgggctcctggatattggagggatttgaggtgcattctcagggccagcacgctttgtcaatttttatatgaaaaccatgtgatttaattcattttctcagatgacatagataattaataacacaatctgcaaacaattataattttcaactttaccccaagttcattgtttctgaattctgtgcaggatccagacatggtactgcccttctcatgagaaactgttcgatctaaactgaaaccagttgtttctcgtatactttggttctccccatgtgcagagatcttgattagagcaagtttggtactttccacgcactcaccctcacctccccagataaagagcagaagttctccttagactgagtctgagggaggagctgttcctgtaccactcagggcctgcggagacccccaggtgcagcttcactgagtcaggtgtttcactccctgtgattgctgctcaggtctaattgtggctcggaattaggacagtcttcaggttatcacaggtcaatcatattctaaaaatcatcgttatcacacaccatggtaacaattcaaggttcatttttctaacggcagtttctcttttttatttggttgcaagtttgaggaaaggaacatgtgataatactttttaacctaacctcgaaatctactgaattgttctaggagactcacaaattggacaaagtgagctctttattctcataaaaatgtgtggttttgggaatttcactgtgttgcccagaacctgttaacatcaacaactatgtttctcagcacacttctggcttgagacgtccttgcagaccctctccctcacctgcactgtctctggattccccatcataaccagtgtttcctgctagaattgtatctgcttgcccctagaagatggacaggagtggatcaggtgcatgggttgtgaagggagcacaaattacaacccactgctcaagagtccatatccagatccaagaaacagttcttacagctgagctctgtgcccagtgaacacacaactacgcatttttaagcaaaagacgcaatgaagggccttcattgtgagcctagacacaaccctccctgcaggggtgaataggagcagcagggggcattcggggcagtatgggggcttaggatgattgttaggggtcaggatgagcaggatcaaggcttcgcatcagggcaagtgcaacagggcagaaaaggggctgtagatgtgggttgttctcaccatcatatttcaccaccagacaccctccactacatctcttctaatgtgtctgagtgttgatatgattagaaaatggcatttatgtaaatactaatatgtacccatatggaggtgcatccagttgtcttctccatcttatgtggaccttgtccatcaagcactaagtccctgtatttacttgagtacctcacacattatggtcaaaacaggtagggtctccttttggcatggtctctcctcctgccttctctcttctgtcacacaaaaacacgtgaactgacacacacacagagcttcccaactttaattatgtgatgtattgaagcaaattgattagtgtgcagcttttctgctttgcctgctattcatgttatgtaaaaataagaaccatgtttttctcagcttgtcacttctctaagctaagtagcatctttgtttattatacccagagaccaaaagcgatccaactgttattcagcagcttaactggtaaacaaattgtggaaaattcacttactggaatcatacccactgctacaatcaagtaatgctggatacacccaacaccatgcttaaaatagcaagtacttgaataagtaaaataagtcagacaaataaaagtgcatacatacgattccacttctataatttctataaagtaaaaatgaacttaaagttacataaaaagatctgtagttgactggggacatggtacaagaagagaaggtatagaaaggagaaactacaggagaacaaaaggaaatttctaggataattgatttttttctctgttagtaaaagtgaggattatgtcaatatttgtaaaattgtacactttatgtaaagattcttatttgctaatttcacctcattaaaatattgcaattttttaaatgtctagtttggtagaaaaggtagtagagagagatgaataaaatacataaaaatcagagagtcctgaatacacacatgaatggaccctgggtctcactgtactttgagggagacactagaatacaaaaacataatgacaggatttcagtacatgaaaggagcttctcagaccccaggaggcatgtccaactgcgtctgggagttaactcagggagcaggcatgtcctttggaaggagccgtgacaccaagctcccagcatccattgtagccgacaccatgccaatgccaagagatctcaactaaaattttctgtggatgttgagtctgattatgccacacactcacaccaagtgagtatggaaaggatagttacctgcatccttaaggtgtctgctgagagcagggcaggtctctcattaaggtccaaagtggcttgatagggcagggaaggagactggctcagggttgttatcatggtttggtggggagcggggcagagcatcctacttgcaggaagggttttgtggggtttcaaggccaaattggcatcaaatgagggagctcctgtgatttctaactagatttaccttgtatgcttaaaaaaagagatgatggaggaatgagcctgaagttatcagcagtcaggcctaaacacagagtctgatgacttactctaaatagcaagtatacaaatgatgagtaagaaaagagacaagactccaatatgggtggacaacagccaggtctgcagaaaatgagaagactgtttataagcaaagaataatgagtaggatatggaggaggattctggtccaatgtcttgtgtggaagcttctcatgatttgagatcatcagcttattctgaaggtcttaggtcacctgtcttcttcaaaatatcagaagtgcctgatgatatgtgaggatgcgcagtttaacttcctctatttgagtagctttacaattgtgtaaaattcttaattaattaatttttttttgagacggagtctcactctcttgtgcaggttggactgcagtggtgtgatcataacatagctcacggtgattttaaattcctggctcatagaatcctcccacctcaacctcctgactagcaagtagctaggtttccagggcccttcatctacacttggccggttctttacattctttttttttttttttttaggtggagtttccctcttcttgcccagaccggagtgcaatggcgccatctcagctcactgcaatctccccctcccaggttcaggtgattctcctacctcagcctccagagtagctgggatcacaggcatgtgacaccatgccccgctaattttgtatttttagtagagatgacgtttctccatgttggtcaggctggtctcaaactccctacctcaggtgatccttccacctcagcctcccaaagtgctggaattacaggcgtgaggcaccacacctggcctcttcgtttttattcatatattccttcagcagccactatgtcttcccactgatttcttcagtttctgccttttccttttgaataaggctgttactcctgagggaagatgggaggtgggcctggacagggacttggtgcattcctctctcccctcccagttcttattggtttctccagtgtctgtagaacagtggttttgatggctttacctctgcagataatttctcttgcaatgtagtggtgatggggaggtgtgtctggatgcatttcagctgtagttgctgttttgctttcccagacagcaccatcccaaggggtagaggctggagcattttgtgatgtatccccagtactgaagaaaaaggcttcaatagcaggaggaattcctcaactgcatacactctgagaatttaaacaataacttctctatcacactcaaattgaaaccacccaatgaatatgtctactttaatcgtgtgctaacttaaatgacatttggcagcctctgtcccagaaaagattatcatctgctcctgtttatttccctgcaagtctttatgtctgttcagatttcagatatattgtttgtcctataacatcaaaaatttgatgtatatatgctaatttgcagatcagtaagtttagtatttgttataagaatagtaacatatttttatggggtgcttacatctccaagctgagaagcacctctgtgtaatactaagcaactagaaatggtacaaataccaagaagacacatagataaacagtaatggcatgctaatttatggtaataacatccatcattagaatcaatacattgttgatgctcaacatgtgtgcatcataagtagttatgtgcgagaagccacacaaataaaacacatactatgtaattcctgtataataaattcttgaaactcaaaactaaggtattaaatgtgaaggactgactcagaatatggtggaggaagaaaataattgggaaggaggaattgtagaggaacacaaggaaacttttaagtgtaatttgtttattcattatttggatggcttttggggatgcacaggtgagcacgagtggaataacattttgttttgtttgtttgtttgtttttttctgaagagatgtggtcctactctgcgacccaggctggagtgtagtggtgggatcatagttcaatgtagcctccaacttctggtctccaacaatactcctgcatctgccatctaagtagctggaactaccgttgtttgccagcaggcttggcttgagtacttattaaaccgcacactttttgcaatatttaatgtatagtaataatgtctcaataagactattacaaatcaatgaatgaataatttgttctgtacagatttatggaaaaatagacactaacatgatgaatgactgacatttatgaaaatacagctgcatgaaatgtgcttctctttacattcattaggtaaacacaatagtgcatacacatcacaccgtgctttcattacaggaagaaacatctgaaaatgtcactggggtgaaccatattgtgctgggcttggttcaggaagcagtcaggcccagtgttgtgaccttcaaccacagaatcctaaaaaataataaaagaggctcccccaaagtccccatcagttcctggactcgccatgtgtctgggccgtatcagtgcatccggagctccctggtggctttagggattccttgcttgccatgctgaggtctcgctgtagattatgttgggttttctgaggccgttttgctatttaagacccactccctggcacagagcgattccctctaaacctgatagaggttctgaactacaaataacgttaagtgaatcctggtgtgtctgaactcacatgattgttacattaagctgctgttgcaatctgtttcctcacctgggaaaagaggagccaggacatagtgagttgaggccccaggaagataactgaattctcagagggcacaaccagcatcctccttccagggagagcctaaaagactggggcctccctcatcccttttcacctctccatacagaggcaccacccacatgcaaatctcacttaggcacccaagggaaaccatcacacatttccttaaattcagggtcctgctcacatgggaaatactttctgagagtcctggacctcctgtgcaagaacatgaaacacctgtggttcttcctcctgctggtggcagctcccagatgtgagtgtctcaaggctgcagacatggagatatgggaggtgcctctgagcccagggctcactgtgggtctctctgttcacaggggtcctgtcccaggtgcagctgcaggagtcgggcccaggactggtgaagccttcggacaccctgtccctcacctgcgctgtctctggttactccatcagcagtagtaactggtggggctggatccggcagcccccagggaagggactggagtggattgggtacatctattatagtgggagcacctactacaacccgtccctcaagagtcgagtcaccatgtcagtagacacgtccaagaaccagttctccctgaagctgagctctgtgaccgccgtggacacggccgtgtattactgtgcgagaaacacagtgaggggaggtgagtgtgagcccagacacaaacctccctgcagggaggcggaggagccggcgcaggtgctgctcaggacgagcagggggcgcgcggggcccacagagcaggaggccgggtcaggagcaggtgcagggagggcggggcttcctcatcagctcagtggtctccctcctccccagcacctcagctgtccccaggactcctctttctttattatctgtggttctacttcctcacatccttgctgcaggttttaacagtcactggcacccttttttcaacaaattcccacaaggcccattttaccttcttgacaagcaaaatattctaaggcttctcactatcccttgattggcgtcatctactgcatcgtgtctttctcttaaattcatgtgatgaaaccccaatcccagtggctctgtattggacagagggattttaagagggcaaataagttaactgtggccataaatgtgggaccctaatccagtaggactcttgtccttatgagaagtggaagacatcagaggcctctctctccacatgcacacagaggagagtccatgtggggatgcgctgcatgagaaggtggccctttgcaagcctggaagaggcctctcaaaaaacttaccctttctgcacccagatcttggacgtcaagactccagaacaataagaaaattaatatttgttatttgaaatagcctagtctgtggtatcttctcatggaaagccaagtagattcagagattcaattgtgttagctccgtctcctgcatggagtagcagcccaccgaggctggacacatctctcaaattattttcataaagaaaaatagatccaagatgaaaaccccaccacatttctgctgagccattcacttagcagcagtctctgagatcagccctgggggtatgttctaggtcgtgtatctcactttccactatgagaatccatgtagataatgagaaccagccagatggagtcctgatccctgcccaccttctgcttccccccaagtgacacacggtcacagaaaaccactccagcatcaccctgtgtcttgtactctctaaaatcccactaaagctgaccctaaactaggagctatttggggctggactcattctgttcttagtcttccataaggtccaggtgccgagtagagcctcagtaaagagtgagcttcaattcccctaacccacatcattcccttacatccttgtcatgcacctgtcctctgcaggcacccagggcaggttacacaggaattgcctgaagctggtctcaggtgccctgctgagaccactggttatgcacacgtatgatttcaggtcatgcaggctcttctgcaggacagacctgtgtcctgtagagcacagacacttggtgacccagggcctcctctaataactcatacatctcatgtcagtgtatatccaggtggcccctcagtgcagcacactagggtgattaccctcacaggtggctttttcaggcggtgaacagaaaatggggtgggcacgctggtcattcccatcatcggtgatatccaagtgaattttaaataaatgaaacaaaactaacaacaaaggggaaggatatgtacctgtatctgggaggtagactgggtcccagaactgtactgggagtgggtgtgaaaggcccttttgtgtgggaagccctccagcatgagtgaaagctgaaggaatgatcactgtaggtggaggctgatggagaagctggcagggtacatttcctgaagctgttcccgggtgcgtgatggttcaatggcccatgtacatgaagaggagggctggactcatgtaggatcaaggaaactaccccatggcaatggaagaaaagaaaatggagatggacacccctggaggcagcttattagctttggtggaggaacgatgggaatttattccaatgaccccagcattttcagctaaatatgagttgcattaacagacagaattatgaagggaagggagaaggagtttatagagggaaaaagcagaacagaaaaaaagaactatgcaagtctatcaaatggcagatgacagagtggagctgatgcagctacttcattcttcccggaacctaccagagaccttggcattcctgtaaggcaggtctagtggtgatgcacttgtccactttttgctttttggagaaacgtttgaaacatcctacattactgaagaaaagctttaattagtgtaatatttttacttgacagttttattggttttgttttattttcagcaacttgaatagaatcatgcacatcatgatatttgggtgaacaacaggccacatacacgataatgatctcattaaattataatactgtattttcactgcatttcttccatacttagatatgttcatatatatacatacctaccatggtgattcaactgcccacagtattcactacacttacatgatgtacagatttgttatctaggagcactatgctatcccacacagcctgggtgtagcagggtatttcacgtaggttcacgtaaacacactctatgatcctcgcatgatgacaaattgcctaaggacacattgctcagatgtatccctactgttaagctacacatcattgtatctcatctctctccatttttggtctctgataaaattctcgtgttgtttttgcattcttctctgagctcattgaacacatttataaggtttcctttgaattttctgccaggtaatcaatatacctccttttaatttgtgtcagtttctagtgctttgctttgttacagaatttggactgctttttttctctttcattattattatcactttgtacattctctgttgctttctgctcattagaaggaaaagccatggtaaccactcttcacagaatatgctcagggcaaatgccatcacctgttagcccagtccatgatagtggtgtctcttaaaatttcatactggtccaaactttttgttgttgttgttagtggcactcagacctatagaggattttaagttttcccctactctaaattaggtggcatcaaaattcatcctgcaggcagtctctgataaagtggagaaattggacaaagttttagcatgtatatggttcataaaaataatatgagtttaaggttttctcagccagttgctacatattgatattttataatcatttctttgaatgtctctggagtttatcttttgaaaatttagatcagaatatataccaggtttgaggcttcttgtctggcttaacgatctcctataggtcagcgtgtgaaaaggcacagagtctatctgaagaggagaactcagggaagccccaaaacaacagaggagacaaaactgaggactttgaggaatctaaagcttctgggacctgcagcctccagacatgctcagcaccctcttgttatccacggactaatttctttctcttttctgagtggtattttctagggttcccgtcctccactttgacactttggtatgtccatgtgtgtccattgtgtttcagccagggacacagaaccaggaaaacatcatggcttttctagagggagctgacctgggtaatcaacagttggagtagaaagtgcctttgtccatgtgtcacaggcctaagggccatgggcaggaggtcaggaagagaggatgaccagacggctggggaaaccaggatgaacaaagccactctccttcctggtgagaaggggcatgtggaagcctggtgtccctgtagggctgaaccacactcacctgcccactgctacctgccagcgaggtgacccacagagcagcagcagctcctgagtcactcacagaggctgcctcctcctccaaaccctccagtgtatgtgcttccataagtgtgagccccagcagatcccaaagttttcaatgggttcatctagctagtgtctgtcctcagccccatccccaggctcctgccctggttggtgtccacagtgtcccagcagcggtgacagtgacagccagggcctgcactttccagagcagcaagtttggaagaatcaagtcccagaaccagcctggatttggggcaaacacacaaatttcactctgaggggaagtgctggaaagtagccttgagtcttcctcagctcacctgtggctgatcctctgcatcccatcagcgatacatgagccctccccaaccccagcgtggagctgtttcaatcgcagcaggatgggaatgtgtcttctttctggggactttttaagcacagctcttatgttcctgagatttgaggtttataaaggtgtgtcagtcacccacagagtggacctgcacaagtaagacaaggacaggatccccaggagaggcacctcatatgagacgggacaggcaggtcccatcacagacactggtcctcagaaaccctgaccagctactcaccttcccaggtcacctgtgtctgatcagttcctgtgtttgctcctgaaaagatccccatcaagggtccccaggtcctgcccccttccttgatgtgcctctgggagtggggctggctgggctgtgggtctgctgtgactttccccacaggtcagcggctcagtgcaggctgcgccaactcggtggggctgggctgtggccgaccctcccagggggagcctggatgcttctcgggggcatctgcaggatcccaggttctgggagaacagggaagccacagtgtgtgcagggccccatctccaggtgtaaagtgtttgctgtcactctgttgacaagggcatatccccaggcctaggggcactgtgggtgcacaaccaatgtggtagacacagagagtaaggcacatttccctcccattactgtggggaatctaggcactgtgtgtgtgtgtgtgtgtgtgtgtgtgtgtgtgtattaggagttttgcagtgggctctgagccccgtgattttgtaggtttagaaattatctgatgagatgttcatccacaggaaccgacaagagattaggtgttctcccaaagcccctgggagctcctggactcattgtgagtgtggactgatccattgcttccagagctccacagaaggggctccctggtggtttcatagaatccttgcttggggtctttctgcagagttcactggctttcctacggccagtttagtattgtaagagatggtgtcagcagcacatggtatcacatgtcactaaatgagcattctgagccaggacacagcatcttcatactggggggagggaaatgctttgggagcccagacaggagcctctctgcagtgcaagggctgggctgcagggggcgctcaaggcccacccatcacaggctccacccccagagcaggtgcaccggaggctggggagggattcctctcaagatctgtgtcattcttctaaaaaaaatctaaaatgagtatttgacaaagactgctgaacattctataaatatcctattcaattgtgagcatttatcaaatttgatgttgtaatgagaaccacttttatactagatatttctaaccctgctagatatcttaatagtatgcagctggaggttaagcaagcttttcttttatataaataagtgcaactttggagaaacacactcatcccccgaataagacattcatgtattaaagcctagaaatactttaaattacctctgagccattcaagtgtgtgttcacagtgaagtcctgttctagggaaaattgttctccagggggagaagctttgtcaacatagagcttagggatgtatcaggaggcacatgacctctaaggggattatagcttgaacccttagcatcctcctgttggtaatacatgtgtcactctccaatctttctcatgcagtatcaggtatgaaataggatcgctcatgaatatgcaaataactgaggtaaatatagatatctttgtgccttgagagcatcatccaacaaccacaactctcctcagaagaagcccctagaccacagcacctcaacatgtactggacctggaggatcctcttcttggtggcagcagcaacaggtaagggacctcccagtcaccgggctgagagagaaaccaggccagtcaagtgagacttcacgcactcctgtctcctctccacaggtgtccactcacaggtgcagctggtgcagtctgggcctgaggtgaagaagcctggagcctcattgaaggtttcctgcaaggcttctggatacaccttcacaagctatgctatcagctgggtatgacaggcccatggacaagggcttgaggaaatgggatggatcaacaccaacactgggaacctaacgtatgcccagggcttcacaggacggtttgtcttctccatggacacctccgtcagcatggcatatcttcatatcagcagcctaaaggctgaggacacgtgcaagaggcacagtgtggaaacccacatcctgagagaaccagaaatcctgagggaggaggcagctgtgctgagctgaggcagtgacagggacaacgtggctgcaccctttgttgacatagggttatacacatacatatatatgcacccaacactggagcacccaggtatatcaagcaaatacaattagagataaacagagagatagacccaataccataatagctggagactttaacaccccactttcagcattggacagatcttccagacagaaaattaacaatgaaatcttagactaaatctgcatgacagaccaagtggacataatggatattgatggaacacttcatccaatggctgcagagtacacaatcttttcctaagcatatggatcattctcagggatagaccacatagtagaccagaaaatttgtcatttttaattaaaaagatatcatgtaccttctctgatagtaatgaaagaaaactaaaataataagaggaattttgaaaacacatggaaattaaacagtatcctccttaattaaacaatgtgcttccaaactgaactatatgctctaaaatgggttaataaagaaacaaacaagaaaattttacaatttattgaaagaaatgataatgaaaacagcgtatgaacacctatgaaatacagtgaacatagtactaagaggaaagttcacagctataagcacctatgttaaaaaagtagacaattataacataaacatcttaggaatatctctcaaaaaaaactagaaaagcaagagcaaatcaaatccaaacatagtaaaataaaaaagttaagatcagaacgttaataaataaaattgaaataaataaaacaataccaaagatcgatcaaatgaaaagttgttttttaaaaagataaaagacatctataaacctttaaccagaccaagaaaaaaaacaaagaagaccaaagtaaataaaatcagaaagaaaactggaaatattacaaccaatagtgcagaaaatcaaaggatcattagaggctactaggagcaactaaatgccaataaatcgaaatatctggaagaaaaggataaatttagagacacatacaacctaccaagattgagccaggaagaaattgaacagatcagtaacaagtagtgagagtgaagccataataaaaggtctcccagcaaagaaaaaacccgggacttgatgacttcatcactcaattatgacaaacatttaaagaagagataatacctaatctcactcaaaatattccaaaaatagataaaaagtagataaggaagggaagaattcttccaaacttactgtacaaggccaatgttacccttatatgaaaaccagataaagccataccaaaaaaaaaagaaaactacagttcaatatcactaatgaatatggatgcaaaactcctcaaggaattcttagcaaaccaaattcaataacatatcaaaagagcattcatcatgaccaagtgtggcttatcccagagatgcaaggatggttcaacctatgcaaatcaatcaatgtgacacatcgtatcaacagaatgaagggcagaagacgtaagatcaggccttaccttgttctcctcactcaaagtctaccattagttctttggtcctcttgaccagtcctgctgtacttggtctcccgtgattctgttcccaggtcctgaaacactgggcttctgcacacctggagtctctctctttgaacatggagaccctgtatcctcagagagggatgatgcctcattgtggctcccatgccccatgcaaacaattcttccaacacagtcatgatttttcctgttggaaattgaaaggggatgtgggaattgatgtgtgtgtgtgtgtgtgtgtcctcaggcctgttgggcctgttgagaacacagcagggctctatgtacaacaggaaagcaatgttttctctataccatctattttcttataaagtgttcataggtaatcaaaaggaaatgaatcacagtttataagatgttgtggactggactgatgttgtcactcaaggctactatgggggctccaggaaaagaaacctagaaaaggataagactgtgagcaaagaagcaaaacctgggaagcagcagggagagggtgagcaggggtgactcaactggggagggataacaccacttaccacagagggtgaaaactccgtgctcagcaaagaggagaacttactcagcatttcccctaatcctccctccagaagcgcgactgccaggaaagttcacaatgtatcatctccagctgggaacccaaaagaaacaggagattttagggcataggtcctgggcacaaggtgtttccctggttcctaccccttccctctctgtccagcaaaactgcttgtttctatcacttgccttcctgtccttggggtaagaatggatgctttgacactcagcagagggatgctctttcagaggaggaatgagtttgtgttatctgatgtctgagcaggacactcacctctgggaagaggctccaagacagaaggtcgccgtggttcctgccccttatatgtgaggggctcttgacacatgcacacttttcctcaaactctgtttataccccagcaacaatgctgggtgttgtcagcctctctcctccccagatactgctctatcatcagcttgagcacagtttccccatgaaaggcattattctctctctcaagaagatcaactttttacatgtcttcgatggatgacagtttttctgtgtgagaatctagaaataagaaatggggtaatggggacaagtgagctctctgtgtgactcactaggaagtccactgttattccaggtgtcctgtcccaggtgcagctgcaggagtcaggtccaggacccatgaggccctcagacacttccctctgcctgtgctgtgtctggattcttttttttaccatggatattatttgagatgaatccaccatcccgtgggcaacaggctggaatggctggggcacagttactagactggatcatcaaggaatacacatcatgcaccctccacccaggtccatgtccccatcaacagtgactcaaccaagagccagttctctgtgaagctcagctccatgaccacctaggacacggctgagtattactgtgaaagactcagtgaggaggtgtccttatgagccctgacacaaacctgtcagggcacttaggacctccaggaagactcaagaccaccaaggggactcacgaccactggggaagggcaggttgcagtaagcacagggccagccccagagcaggtgcaggtggagatgagaggctggtttactgccagggtctggggctgcttctccatttagatgtttccttcagagaccctcccttatttcatgatgctctgcttagctgtaagtctctgaaatatcacagttttgttgtaccaggaggaaaccttctctcaggtgctaaatgtagaacaatctctctgccagtggttgccagggtcacagccctgtggaagctgaagggtacccagtgagtcttctccagtcacattcaggacaggaaccttagtggggttccctgaggagaacagtctttaggaattctaacctcagccaagagaggctgggccagggtcagtgtcaggtagaacctcacaggatttacgtctgacccttctcctgacactaaagcatgcaaatcagtatcagcactgatctggggccccttttgctcctagcccattctatttcttgttagttgtatttgttgttgattttccttttgctgttcctgatccctgtaaagtggagatgtggttcctgctgtaaaaattccagggctcaagccctttccctgcagctcaggtggggctcagactgtggctcctgcaaccacgtgggagaggctgatgggactatcttctctcccgttgctcagaaccctccagtgtgttgtgtggagactcacctgggaatgcaagtggccaatagttgtgaaaggtatgcgcttgtttggtcaaagtggaatgtggatgtggaatttatcctgtgttgtgcaaactaacacaggttcaccttcctcacctgtagtgttagaaagagtgtgaaagttgtaagaatcaaaacagagccacttgtgttaacaccctgacaaatggacctaggaatgaacatgaaggagggttcttaggcccatattcctgataacaaaaactatcataaatagactctgcttagccaccatcttggatagaagcccaccacaaccttattaaaaattacacttgcaagaacatcagctcagaaactggctgttcaaccttacactgatgccaccattgctattgattctacaactatatgataattatctcaaaacaacttttgtaacccacctcattttcacttcataaacctgtggattgacatgttggagttactgctgcatttgtagataatgataaataataaggccttttaacaatgtttgaagctgctattctctgatgtctcttctaaaataaagaatttccaagtggatgacaatgaaaaaattgttagaaatatttggtggtaaggcatctttaacatcctgttgaatgtttctgcatagcacatcaatcccttaaaatactttgctatatctgcatttaatgaatgagtctaatattgaggtgcaattgaaaatacctgggcctttgatgaatcagctcatagggtgataatgtctgggtccttgagaaagcagaccctgtgttgtaagttttagtagaagtaccttttgcaaagaaagttcatgtgtttctgaacattatgctacttttaacttaagaatgcaatatatgatttatttttacttcaaactgggtatatacccagtaatgggatcgctgggtcaaatggtatttctagttgtagctccttgaggaatcaccacaatgtcttccacaatggttgaactaattttcactcccaccaacagtataaaaatgttcctatttctccacatcctctctagcagctgttgtttcctgacttgttaatgatcaccattctaactggaatgagatggtatctcatcgtggttttgatttgcatttctctaatgactagtgatgctgaacattttttcatttgtctgttggctgcataaatatcttgttttgagaagtgtctgttcatatcctttgcccactttctgatggggctgtttgttttttccttgtaaatttgtttaagttctttgtagattctggatattagccctttgtcagatgggtagaatgcaaaaattttctccgattctgtaggttgactgttcactctgctgatagtttcttttgctgtgcagaagctccttagtttacttagatcccatttgtctattttagattttgttgtgattcatacttggttaatttttaattgcattgttttcttctgattagttgtaagtatacctgcatattgatcaaaaaagccgtttaacaaatcaaaaggaaacatttaacaaatacgtgacttggaagtattttctccaagtctgttgttgtcttttactcccttgtcagtgtgtattgcagaaaaatatgtatgtgtgtgtgtgtgtgtttacaaattaaagaaacaggtataatttcatttatccatagatcacgtctttggcattacatctgaaatctcatcataaaatatactaatagtgatttttttttccatgtctctaatctcaggccacaatctactcatgagtgtttaaacatcacctacttgattagaggactatcaccctaagatatttggaatatttctggaaggagatgtgttctttttcccattatttctctatttagtcatttattaatatccgtattggtttatgaatgtctatttcatactctgaagtaaatccatgctatattattcattttattgttcaaatcaccacagctttattatgtgcttggaactcatttagtttggatgctgcatccttacagcacacctcatcattttgtttttgaacactttcctgtttcctggtattacaatacattctaagcccattttctatattaactttttcatacatagaatcagacatttttctaaagattgcttctttctgatgttaaaatatagtattaaaataaaatttgtgatactgggtatatgtgttgttaatgtggtataagtacttttaggacctctcaaccaactggcctagtaaatgtgcatgtttatatgaactcatgtttaaggacacattgaaactatttatgtatcttatattctgtaactttattacattaaaaatgagaatacactggtctcctcacccaactatgttaccaccatatcgacctttctaggcttccttgactgtccataatcacccactgcaaagtgaggaaccccatcccatcatatgccattgtattacttagctgcacaatttcaggacacatgcattgcagcatcagaaatgtaaagctgtacccttcttggaaccatttttatctactagaatagagtgcttatgtgcagtttctttacactttaaacttatagaatttcctcattttcaaagttccttagatcagcaacttcgttttccactttcttcatgaagtcatttcaattacactgtataatttctttatttgaattctgtaaaagccaaaactacagtcaagtaaacatagagaggatattccaggaatttacagagtgggtatcaaataagttaaaaaggcaatgtttaagaagagtaaaactatttttagtgatatgcaatggttgagacatgacacaattaatttgtctaagctcataattttgtgatgaaaaatataaacctaaatatatacaatttaaaatgatgtttagcagtacattatccctaggatcaaatgcagactgtataaaattatctaataacttatttggtgaggatgccatgagacacatgcaacaaagaatgaactaattttccttatttgcatataagatgttgacattcactaaagatctttaatttaaaaaaaaatcaattttctatgtgacccaggttttttcttccagacaagcaaataacccacaggattattttctttccttgattgagaaagattttccccaaacttcagctcagttcaggcatatactgtccctaaatgggcatttaccctcagatgagtccacacacctgtcaacacgtggagtcttctgtcagacaaacacacctttactgatgtggattcttccctcagacaaaaacacatgtccccacatggacactttcctcagactaccatgtatgtccttacatttacgctttcctcagaaaacagacttttcctcatgtggactcttgtctcagacaagcaaatatgtctccatgtgaactcttcactcagataagtacacatatgtccacatttactgtttccctacacaggcacatatattcaatgttgaattgttttgtggcaaaatgatctcaagataatggtaattataaaccccctccctaataaagtgtagatctgtattttttttgttgtaacctaactttgccttattgtcaaaaacagtaatttgcagctctaaatgcaccagttagagacaggtgtccattttctctggaaatgtatttttattttcttactggacatatttgttgataatgttgctactatgaagatacctgaacagtatccacattaaagaataaaaaagagtaatgggcagaataaccctgtgcatccagacccagaaatcctttgaccctgccctcccgaaatgtagacacagaggatggatgagcagtgctgagcagtgtacccatgaccacaaacatgaagacatggaaatgtgtccccactcctcctcatgaaaggcagctcatgccctcttccttcaggccctggtatggagccaccccatgtctctgcccttccttagtgtccacaccatggggtctgcactgatctggattcccttctcatccccctcaatattagtgtgccttgtgaatcaggtccagctgtggctgttctcagtctgtttcctctgtattcacagaagtcctgtgtgatgtttactgatggagtcagaaggagaaaaatttaacagcccagcagttcactgagactgtcctgcaaagcctctggtttcgggtttactgggtgcagcatgagcttggtccagcacgcttcacaacaggaattggtgtgggtagcaacagtgagagatcatatgggagttctaagggttactctccatgagtacagataaatcaacattcccaagtgacaccctttcaagtgcagtctaccttacaaggaccaacctgaaagccaagggcaaggccgtatattacagtgagggacacaggggagggaagatctgtctgagcccagacacaaaaatctctgcagagagacaggagggaactgcgtggtagatgctgctcagaaccaccatggggtggccaggaaacaaggggtgcttaggacctctagggagcgctcaggacgccaggggggtgctcagaaccactaggggacgctcaggacactaggtggcgctcaagacaacactactgcactcatgtcaccacggggtactcagaaccaccagggggcgctcagaaccaccagagggcgctcagaaccaccaggtggcgctcagcaccaccagggggcgctcaggacaccagggggcgctcagaaacactcggggacgctcaggacaagagggggtactcagaaccaacagggggcgctcaggaccaccaatgggtgctcagaaccacaagggggcgctcaggacataggtggtgctaaagacaacaattctgggctcaggtcaccagggggcgctcagaaccaccaggggacgctcaggacatgcaggttctcttaggaggcagctgcacatcaggagcttcagaggctgtgatttcctttcagaccctggaaattcctgacctggtcaagcaaaagtcttccccaggatgtctgatttttccttttaattccatgatttcttttacctacaaaacactaacttagaacagggatgtaatgcaacttttattgctgcgtattttctgagtaatactagcaatgatctctcgggacaattattaaaataggttatttatatattttaattattaaaaataatactattattaaaatagtaaaattttttaaatcacacttgtaatcccagcacttggggagactgaggcagacagattacttgagctcaggagttttagaacagcctggcaacatggtgagatgctttctatacataaaagaagaaatagctgagattggtgcaaccagctacttaaaaggctgaggagggaggattccttaagcctgggaggttgaggctgcagtgagctatgattgtgcctccacacaccagccttggtgacagagtgagaccctgtcttagaaaaaaaaatgcatatcctcaatacagactatttccatgaatagagttttgtgtttttgtgctgtaatagtcaaacaattgtatatgttttctaactttaactcagcatatgcatggtgttttgtttctttttctttcatctgctgtttgtggaaaataaacagcactttaaaggctctgtttctccactttgtttggcttccagtgtcctgtttttcagactgtttctccaccttcccttcttctttgaaagccatttatcttcctcagtctccatgcagaaaaagaaagtccctttactttctgtcttccaagtctggtgaatcagttcccttcttttcataatcactgaagccaaccaagtttagaagtataacagttctccttagaatacgctcatctacctgcactctctgccctcctcatccttttctaggtccctccagacatcaccctcatcccataccctcccttccttaagtaccacagagtgggctcttcacctcctgctgccctctatgtgctcagccctggggctcactagtcctttgattatgaagtccaaatccctatgtgcttgcacactctcacgccaccctctaggaagctgccattgtgagagagtcctgaaaagcatgggctgggtttagtttcataatgcatattatggtcaattagttattctatttgaacattctatttaattaatagatagagttaattaaatagagttattctatttaattctattaaactattaataaattagttattcaatttattaataacaggccaatatttaaaataaataccattgcacgtttaagtgacatatttgacaataattgcatttacatacagttttaccaaaacatgtatcgaagtgtatttgtttttttaaatattggaataggcagacatacacataggaaaacattattttgtactacaatctcaaactgcaaacacaatttaaatgccattaaataattagaataatatgaaacaaatgggcatggtgttttggtgtttaaatatacattcatttcacctgatcatacttatgtgtctttgctgggctgctgtgcatgtatgtgtatttgtatgaccatgaagctttcagatacatcattaaattacataaagtgttaccatgcacttccctcttttaggggacaaagtaaatctttcagggcaatcgcagggaaaatgtgtggttggatcttccacacagagtccctaccatgacattgccaagtagagctatggaagggggctaccaacctccagaccccagaatggtagatccacaggcagcttgcagctcgagtctggaaaagccacaggcacccagctccaacccatgagagcagccttatgggctgcattagggaagtcacaaaggtagggctgcccaaggccttgggcacccacccttgcaccaggtcacaagacatggagtcaatgattattttagagccttaagattgaaggactgtccgactaggttttggccttccataaaaatctttacccaatttttgggccattttctctttttagcataggactcctcacccaatttctgacccatcattgtactttggatgtaaataacttatttttgatttttcagtctcataggtgaaaggaacttttccttgagtctgaactttggattttgaattaatgccaaaacaagttcagattgtcagggaccactggggagggattattgtatattgcaatgtaagaaagacataaggggcagaatgatgtggtctggatgtgtgttttctccaaatcttatgttgaactgtgaaccccagtgttggaggtgaagtctgctgggaggcatggcattaggggcatatccctcatgagttacttcgtgtcatccccttggtgatgaatgagttatcagttcacatgacagctgattgaaagagcctggtaccactcccttctcttatcttcccccctattgtcatgtgacactcttgctccccttcatcttctgccttgactgtaagctttctgaggcactcagcagaaacagatgtcagcaccacacttgctgtacagcctgcacaactgtgagccatataaaacctatgtcctttataaattatccagcctcaggtatttctttacaattcaataatggacgaacagaagaagtatttaattgtgcagcaaattaggggtgtggaatcattaaaatggacttaacgcctgtagaggtaaagacacaagagtctctctctctctctctctctctctccttgaacccttctctgtctttacatacacacacacacacacacacacacacacacacacacacacacacgctccacgtgaagatgtcatgtgaccaaatagcaatatggtggctgctatgagccaacagtagaagcctcaaaataaaacctatcttgccagcatgtttatctttgaatttccagaattgaggaactgagataaaattaaggttgtgtaagttaccaagtatgattgtttttaatgtttgaactgactaaagagaatttgggatgaagaagtggggttctgatgttacaattatttcaacactgtggaaagtgccttggaattgggttatgtgtaaaaggctggatagttttgacatgcataaagaaatttatatattaagtgtcattctgatagattaaaatgagtagagtgctattggaaactggataaatggtgatctttgttataaagtgacaaaaaaaacttgtctagactatgttgtgatatttagtaaaagagaactttgagcagcaaaattgaatatttagctgagaacacttctaagtaaaatgttgaaagtgtagtttggtttctcctgggcatttataataagaaatagatgaattgaaaatgaaattataagggagaaaatatccaaaacttaaaggcttggaaaattctcaatctatctgtgttgcaaaaatcagaaagtgcgttctgaagagaacagtgagtatgaggctgtaatatcacttgataaagaatttatggtattaaaagagaataaatgcaggttttaaagaacaaggatggagatgagacaaaatggacgaatactgtcagattcttcagatttaagaggatggagctacttggttgcaaatgtgcaccattcttccagaacaaagaaaaataaaccttgaatttatttagaagtaatcatgaccactaccttggtttcaacagaccagaccatccatgcttaaaaccttgaggaaaagacctcctaccactgcctggaacttaggaactcccagtgagccttgtgtgtagggctgcatggggtctttgggatgggaccttaacccagcagttacccattggtgcctctacttaaagcattggaattaattctgctgctgcaatgagctgggaaagaagaagcttggcccagagaagattccacttgagccttaaggtctatggtaatttgttttgttatgtgttgtacttgctggggacacatcacccctcctttcttttctatttttctctttgggggagaaaatgtctattttatgcctaactcaccactgtattttgaaatcaaataacttgtccagcgctatggactgaatgtgtatgcaactccaaaattaatattgtggaaccctaatccccagtgtggtgtaattggggtgtgggccatttaaggggtgatcaggtgaaaaggttgaagccgtcataaatgagattagtgctctaataaaaagtcacgggagagcttttctctcttgcttccctgtcatgagatgatacgataaaattacggccatctgcaattcaggaaggaaacctttacatacacatgattggctgtcttgggcttcccagcattcggcactgcacagaataaatatgtcttgttaaagtcatgcactttatgacactttgttaaagcagccccaataaaataagatatctggttttactggctcagagttggagagaaatttgtttcagaaataattctacctcaaatcttactcatgtatggtttagttaatatttaaattatgttttaaacttgtttagagttgatgatgaaatgagttaagagtttggggactgttataatcaaatgaatgaactgcgaatgtgtaaatgccatgcatttgggggatggtcttttctattctgggtctttcatgcctacgtgtgaattgaaggattgcttttcttatttctgtgaagaaggccattattattttgatagataatttatctaatctgtaaataactttgggtagtatgaaaatttcaatactattaattcttccaatccataaatgtggagtatctgggatatatgtcctatttatgtgtgtccatttcattttctattaccaataatttatagttatcctctagaaatctttctcttatttggtaacatttattcctaggtatattttgcagctattgtaaaaggaaaggcttcatggatttcattctcagatgttttgctgtcaacatatagaaatgccaccaattattgtatgtagatgatgaatcttacaactttacttaatttgcttatgaattctaatagtttgtgagaaggctttagttttctttttttaatataagatctttttgtctgctcacaggaaatctgacttccacaattccaaatttgaggtcatttccttttactgttaactaaatactctggctagcatttcagtactattctgaataaaagtgataaaaatggttatttttgtcttcttccacttcttagatgaaaatttcccggtttttccatgcttcgtgtgatgaaagctgtgtttttctcatatatgcgctttattttttgagatatccttcttgtatacctaatttttgataatttctatcagaaatgaatgttgaattttattctatgattttctaaaatatcttgactacacaataacacagtaatatgcaggtcaatacatatcaactgaatttcacttaatatcatcccaacttctaatatttattttttagtattagaacatgcctgtttccatattatatttgctcacaggtattggtacatattttagctaatttgtcattattttactctaagaaataactcaaaaaatcatttttattatgaattgaaaggtaacatcggcaaaattagcccaatcttaatctttcccagactttgaaacattattgaagacaatgagaggggaaagtcagctttagttgagcttctaagaggtaagtgaggtaaaaacccagggcttattggctacgactttgaatgttactgtcttcttttccataagccacatccagaccattttctaaatctaagaaaactaattttatctcactgcttcttagtcttgtttcctgcagctgacaaccaaaactgtcagcgatagagcccagtgtaaatcaccagcctttaattattgcagaactatgattttacaacaacattgtgagttacataatgatcctactttatggccgcggtgcaaatgcttaacttccactaaatcacagagctcagaatggctagcatggaggtgtatatgtatatgtgcattgttctagaaatttccaattactgtatattattgtttgcagtaattaggtcaatctgaactgacaaaagtctccatggccttataagcacagagaccacctccacggcaggtggaaatcaaggctgggaacagtctaccagctgctcccctgggattcctccaattaccctgtttaaagcctctgctcactcatgcgctggaagagggatgtcagagatgcagtctactcttcctaaagggctgacagggcataaagacaagactgattatccatggaacattcctataggaatgcacctatgtgcagacacactaataagctgtgtgtcttgcagtgtgtaaatggctgagatgccatttacacttctttacacaatacatttttaaatgttttgttgatgtattctctatcattcaaaaaaatcatcactttccccctaaacaaagaggatttttatcagaacacttatgggaagccccttgctctcccagattcccaccctcatttctcctgaaggaagaaagaaaaccatctctattgatttccactctcatcctctaggactaaaaccagaaagctgcatgctccctgggtgagccttagagaagaccctgtctgtaggagcaggaatctcagagccttggctgagaggcatggtcctgaaatgagatggagtcccccatggagatcccacgtggacgcccacacctgagggctcactgctcctcaccacagatgcactcccctactgagtcctgagacctgagtgcaccccatagagtaggactcagatgagggaatgcaaatctccaccagctccaccctcctctgggttcaaaagctgagcacggggcctcgctcagtgactcctgtgccccaccatggacacactttgctacacactcctgctgctgaccaccccttcctgtgagtgctgtggtcagggacttcctcagaagtgaaacatcagttgtctcctttgtgggcttcatcttcttatgtcttctccacaggggtcttgtcccaggtcaccttgaaggagtctggtcctgtgctggtgaaacccacagagaccctcacgctgacctgcaccgtctctgggttctcactcagcaatgctagaatgggtgtgagctggatccgtcagcccccagggaaggccctggagtggcttgcacacattttttcgaatgacgaaaaatcctacagcacatctctgaagagcaggctcaccatctccaaggacacctccaaaagccaggtggtccttaccatgaccaacatggaccctgtggacacagccacatattactgtgcacggataccacagagacacagcccaggatgcctcctgtacaagaacctagctgcatctcagtggtgctccctccctacctctgcagaacaggaaagtgtgactgagatgccatttcctgccagggcttgtgtttcctataccaaccagactcagagccctgtctgttttcctattctgtactattaaatggcatgttccctgttagtgattcacgcaagcagaggctgtatcctgtttgacaaagattgagcatgaaagattcccattacctgggccacatgcatcactgatatgtggccacttatttcttgagctcatatccttccaaggggctgaatacaaatatctataacataggccatcttaaactgcaggaagtaatgttggagaagaatgtggagataaaagagcaggatgattaattaaaatccagataccatctttttttgcagagaaaaatttacactaataaagtaattttatgaaacaacaagaaagatggaatgtgtcctcatcatggagtgtctcacttgcagtgcacaaataaatttctaaaaattttatagggaagatgtgatagatgaggctgatttccacacagggagtgattaaatacccaggtaagtataaaatccaacacttggaaaggaaaatgcctcagcttgacatcagaaacccagctcagtaagtctgaggagcaatgcggaaaagaaatgaaaaattcgacaacacttttcttatgaaatccctagctcatgtttgaacacgaaaacagaattgtccacaattttaggacagccatcgcatgacaacaaaccactacaatgataggagcatcactgagtcaacggagttcaagcagtgagcagatcagtactgaggccccaggagaaccaaggctctttggtacattttacagaacccagaaccgagccacataatctatggccaagtgatctttgacaaagttaacaaaaattaaccaacgtatacaccagggaaaggacaccccattcaataaagggtgctggggatattggatagctatatgcacgcgaatgaaactggacccccaccctcaacatgtaaataattaacacaaaatagattaaaggtttaaatgtaagtcttcaaactgtaaatgtattcaaataaaacaccaggacaactcttctggacaaaaagcaaacaatagacaaatgggacttaatgaatctaacaagtttcttcacagcaacagagtgaacagacaaagtgcagaatgatagaaaatatttgcacactgtgcatctgacagagtactaatatacagaattaacaagaaactcaaaccacaacaacaaaagaaaacaagaaccaaataaccccattaaaatgagcaaagaacatgagtagacatttttgcaaataacacataaaaatggacaatagatatataaaaatgctcagcattactaataatcagggaaatgcaaattaaaactagtgagatataccattcacaatggctgttattaaaaagtcaaaaataacagatgttggagaggatgaaatgtaaagggaactcttagacactgttgatgagaatgtggacgagtacgacctctatagagaacagtatggattcagtatgatattgactgtgcatttgtcataaacagctcttattattttgagatacattccatcaatacatagtttaatgagagtttttagtattaaggggtgttgaattttattgaaggcctttgctgcatctattgagataatcatgtgttttttttccattggttctgtttatgtgatggattatgtttattgatttgcatatgttgaaccagccttgcatcccaggtatgaagccaacttgatcatggtggatttgaaaaccggcacaagacaaggatgtcctgtctcatcactcccattcaacatagtattggaagttctggccaaggaaatcaggcaagagaaataaataaagggtattcaaatagaaaaagaggaagtcaaactgtctctgtttgcagatgacatgattatatatttagaaaaccccatcatctcagccccaaatctccttaagctgataagcaacttcagcaaagtctaaggatacaaaatcaatgtggaaaaatcacaaacattcctatataccaataatagaaaaacagagagccaaatcatgactgaactctcattcacaattgctacaaagagaataaaatacctaggaatacaacttacaaaggatgtgaaggacctcttcaagagaactgcaaaccactgcccaaggaaataagagagggcacaaacaaatggaaaaacattccatgttcatggataggaagaatcaatatcgtgaaaatggccatactgcccaaagtaatttatagattcaatgctatccacatcaagctaccattgactttcttcacagaattagaaaaaaactactttaaatttcatatggaaccaaaaaagagcccatatagcctagacaatcctaaggaaaaagaacaaagctggaggcatcacgctacctgacttcaaactatactacaaggctacagtaaccaaaacagcatggtactggtaccaaaacagagatacagaccaatggaacacaacagaggtcccagaaataatgccacacatctacacccatctgacctttgaaaaacctgacagaaacaagcaatgtggaaaatgatcccctatttaataaatggtgttgagaaaactagctagccatattcagaaaactgaaactggatcccttccttacaccttatacaaaaattaactcatgatggattaaagacttaaacatgagacctaaaaccataaaaacccaagaagaaaacctaggcaataccattcagtacataggcatgggcaaggccttaatgactaaaacaccgaaagcaatggcaacaaaagtcaaaattgacaaatgggatctaagtaaactaaagagcttctgcacagcaaaagaaactatcatcagagtgaatgggcagcctacagaatgggagaaattgtttgcaatctatccatctgacaaagggccaatatctagaatctgcaaggaacttaaacaagcttacaataaaaaaaaaacaaccccatcaaaaattggcggaaggttatgaacatacacttctcaaaagaagatatttattcagccaacaaacataaaataaagttcaacagcattggtcgttcgagaaatgcaaatcaaaaccacaaagagataccacctcacaccagttagaatggcgatgattaaaaagtcaggaaacaaaagctgctggagaggatgtaaagaaataggaacgtttttacactgtggtcggtagtgtaaattacttcaaccattgtggaagacagtgtggtgattcttcaaggatatagaactagaaatgccatttgtcccagcaatcccattatttggtatatacccaaaggattataaatcattctgctataaagacacatgcacacatatttttattgcagcactgttgacaataacaaagacttggaaccaacccaaatgcccatcaaagatagactggataaagaaaatgtggcacatatacaccatggaatactatgcagccataaaaaggatgagttcatgtgctttgcatggacatgggtgaagctggaaaccatcattctcagcaaactatcacaagaacataaaaccaaacaccgcatgttctcactcataagtgggagttgaacaatgagaacacaaggacacagggaggggaacaaacatcacacaacagagcctgtcggggagtggggggctggaggggatagcattaggagaaatacctattgtagatgatgggttggtgggtgcagcaaaccactatggcctatgtatacctatgtgacaaacctgcacattctgcacatgtatcccagaacttaaagtatagttaaaaaaaaagagagagagagagaaaggaaacagtatggagactttccaaaaaatgagaaacagtactggcctttattctaccaatcccactactgggtagctacccaaagagaaagaaatcatatttcaaaaagatacccacacttctatgtgtaccacaaatctattcccaatagcacatatgacaacctgagtgtccaccaacagatgattttataaaagaatatagcatatatgcacaatttaatactagtcagccacaataaggaatgaaactgtgtcttttgcagcaagatgcctagaactgggggacattataattagtgaactaactcacaaacagaaagccacatatcacacattattacttataagtgggaggaaaacagtgtgtacacaaggatatggagagagggattatggacattggagacttagcagaatgggagggtaggagttgggagcatgatgaaaaatcacctaatgggtacaatgtacgttacttgggtgttgggtacactaaagccaataccactgtgtaatatttccatgtaacacagttgcacccatagcccttaaatttatacaaataaagataaaaacaattacaatttaaaatataaaattattaatagttgaccaaagatcttgaaaattaaaatttaaatcatgatcaataaatgaaattaatatcagttgaacttcatttaacttaaaatccttttgtactcaagtgattttaagaaaatgaatgtcaagttttagatgaggagatttgcaaatcatatcaccacctatgtaattatagtaagaaccctcaaaactcaacagtgaataaaagaagaggcaacccatggataaaataggcaaaggtttgtgcaggcatttcattaaagaagatgtacagattacacataggcatataaacaggatctcaacaggatttttcatcacagaaattcaaatcaagaccacaataagatacccaaacaccctttttagaatggctgaaattaagaagaaagatggatcataccgatgctggtgagcataccaggtttctagagtctaaaacattgctaatgggaatgcaaaatgaaacagctacacaggaaaataattcttagtttcttgtaaaattatatatgcccttaacacattacctaaaaatccccctcctgtaatacagtaatacatggctgtgtattactgtgaaagaggcatagtgtgaaaacccacatcttgaaaccctgagggagaaggcagctatgctgtggctgaggagattacagggattatttgattaaagacttttttagaaagtgaggttaaatcagccgggcgtggtggttcacacctgcaatcccatcactttgggaggccgaggtgggtggatcacgaagtcaggaatttgagaccagtctggccaacatggttaaactccatctctactaaaagtgcaaaaaattagccgggtgtggcggtgtacacctgtaatcccagctactctgggcgctgagacaggagaatctcatgaatcggggaggctgaggttgcagtgagccgaaatcgacccactgcaccccagcttgggtgacagtgcaagactccgtctcaaaaaaacaacaacaacaacaaaaagcgaggttaagtcattgaaaaataggaaaatataaatgtgtatgcactctaattatttgggaaattttccatacaacttgtattctgtaaacaaaattcagggagtggaaaacaaatcaaattaataaaactgatataagaattcctctgaagatattagtgtgagcactaacacacacttttgaatgggtgttgtaaatattttggaacacacctcttaggtcacattttaattctacatttatgtaaattatataaaatatcgaaattttttaatgtctccattttgtgcagttataattttggtttcatgccagcaatgcatgatagattccgttcttccacatcctcgttgccatttggcactataagcattgtgtattttaaccattctaatctattggtggtgatagctcattgttgtttaaatgcacatgtctctaaaattttatatttaattattttatataattgtgatgaagtgtttgttatggtatttggctcatttttgatagcattgtttatttttgatcagttgtaagtttctttacatacccattatataagtcacttaaaaaagtacttagctggtcatgaaccccaggatgagatgcagactgtatagaaatctctagcaatgttactcagtgtgggcagggatggcatgagatacggggaataaagaataaagtaactttctccatttggatataagatgtgtccattcactagagagttttctttcagaaggttcccatgtgagccagtttccttcctgacaaggaaatcacccagaggattctcataatctcttaagtgagaaaagttttcctcaaactccagctcagtctagctcacactgtctctaaatgggcaattactttcagacatgtacacacatctgtcccaacgtggactcctccctcagacaagcacacacattgcaatgtggactctcccctcagaaaaccacacatgccccacaatgactccttcttcacataagcatatatgcctgatgctgaactgctgtgtagcaaaattagctcagaatacaagcacttatggactctagccataacaatgtgtagatctgcattttattttaaattctaaatgaacattttgccttcttgttaagaacagtggtttacagctctacatgtagagactacaggcagatatatgtttcctctgggaaaagtttattttcatgtatttactgggttattttgttgataaacattcatctataaagacacctgaaaagtgccctcattagagaaaaagaaagtgtagtttgcagattaactctgagcatccaatcccaggaatcctttgatctgccctccctgaaatccacaggcagaggggggatgatcgctgataagtagcaaacacatgtccacaggaagggagacatggaaatgtggtcactcccacactcaagaggagcagctcatcccctgtccgtagtggtcctggtgaggagccaccccacacctgtgccttcctcagtatccacaccatggggtctgtgctgatctgggcttcccttctcatcactctcaatattagtgtccttgcggatcaggctcagctgtggctgctccagatgaggctgttctcagtctgttccctctgtgtttgcagaagtcctgtgtgaagttcaccgggggagacagaggaaataacggtgcagccgggggctatctgagtctctcctgcaaagactctggattcaccttcactgattgcagcataagcttggtccagcaagctccaggaccagggttgatgtgggcagcaacagggagaaattgaagaggaagctctcagtggtgccctccatgaatacaaagaatcttcacagtccccaggacacccttacgtgcatggtctcactgatatctttacttcttttatcacttttgttatgtaaatcacaatgaatagtgtattcctcatctattatacatttgttaagtcttttttggtgtctttaaaaaaactgataactttatagtatgtaatatccttaagtcctgaaagtgttttttgatgtctaccttgtcttaaatttatacagctactatagcttttcttggttcatgttttctcatatttatcttttctatttgtgaatatgtagagaaactttcttgtacatagctaatagttgtgtattgcttttttattttggcagtccttaaatattctaattttttatgatactttaagttttagggtacatgtgcacaacatgcaggtttaaacaaacaacctcatcaaaaagtgggcaaaggatatgaacagacacttctcaaaagaagacatttatgcagccaaaaaacacatgaagaaatgctcatcatcattggccatcagagaaatgcaaatcaaaaccacaatgagatatcatctcacaacagttagaatgacgatcattaaaaagtcaggaaacaacaggtgctggagaggatgtggagaaataagaacacttttacactgttggtgggactgtaaactagttcaaccattgcggaagtcagtgtggcgattcctcaggtatctagaactagaaataccatttgacccagccatcccattactgggtatatacccaaaggattataaatcatgctgctataaagacacatgcacacgtatgtttatagcagcactattcacaatagcaaagacttggaaccaacctaaatgtccagcaacgatagactggattaagaaaatttggcacatatacaccatggaatactatgcagctataaaaaatgatgagttcctgtcctttgtagggacatggatgaaactatctattgcttttttaaatcaactataataaattctattttttttttttgagaaggagtctcgctctgtcgcccaggctggagtgcagtggtgcgatcagggctcactgcaagctctgcctcctgggtttatgccattctgctgcctcagcctcccgagtagctgggactgcaggcacccaccaccacgcctggctagttttttgtatttttagtagagatggggtttcaccgtgttagtgaggatgctctcaatctcctgaccttgtgatccacctgcctcagcctcccaaagtgctgggattacaggcatgagcaataaattctatttttaaaccaacaatatttttttccgttaatttttgtttaaattaacattttgtaatgatgcttatttctctattaacatggtatttaattacctttttataaatattgtatagttaccataagatttacaataaaaattgtatgtaattagattctaatgtaaatcctgtgatggccttgatatgaagaacacagatagtgtaactgtgtgctttgaattcctccttctcgccactctttcttgtttattctgtttgcacttacatatgctgtaaaatagaatatgtaattttttattactttatacagttatatcttatagcaattacaaatgttaaagagtacaattcatctagatttttccatttttacaatctttatttctttgtagagatttctattttgagtgcatatcacatggctactcgcagagaatctttgtaaaatgtgccctgaaacatgaatgtgctgacaacacatattctccagatctttttttctgacagaattttatttgccattcacctttaatgaaattttaatgcatgtagaatttcagtttgcatttcacctgtaatttattttcttgtaattattattagtttttcctggagatgatcacacattacattctgctgggcctttattaaccatgtttctgcgaacctagtcaggcttgggtttcaagtgtatggttgccgtggctatcagagttgaaatcagcttctcctgttcacaaaaacttcaggttcctctggtgatacctgcgtttgtgtccctgtttggctttggatcttcacatttcattctccccaaagaaaggctgtctctttcagctgtggcaggtgcatcctgctgacacatttacttggtgactttttgtgggatgaaggggcttggacacaggggcacgttttccaaccttctggctgagcctccttcttagctatgggtggtgagactggctctgatgcatgatcttccaagtgttcctgttccttcccttcctcagtgtcacagtgtctcttcccagtcatgctgttttttcatcagtgtcctcagcttctgacccactgtccttaccccacagattctggatttcattcctcaggaaacagacgggaggtgattctgggtagagtttccctgatgtcctctgtttccttgtgttctagttgattctaccagtgcccacaggacacaagatttaataaatgtctcctgcatataatgaagggggattcagcattgaacggagctactgttcttcctccccagtcaacaccacaggacagcaggtgggtgagttgtctggggatttccccaattctgtaggaaaagcctgcaagtgccaggagtttcacactctcacaccattagcacacacgtcttcaagcaactcattaaacatttccaggttagctttttcctatcttcaataccatgccatgagtggcacctgccccaggtactctaataaacgcaccctagttctctctgcgggcccctattttctcatatttcagggatttttttctctgtgacatcaactcagatatggtgaggggtttattttttgtaattcttcatgttttttgttaacgaggtcagaataatatcattttctcaatttttacattctaacgcttagtatctgatttctaaataaaattcagaaactaagacaacaaatgaagtatccattatttggtgcattgttaaacaatttgagaaatattcatgtactgaaatagaatgaaccactgaaatcaaggcatgcctcattcacataagaacatgagggcattatcaaataattttgctgagtggaggaagctaaagaattcaccatcaatttcatgtgatttcatttgtataaatcacagaagatgcaatattctaaattaacatagagaagatctgaatttctctgaaaatagggtgggcagagtaacaacgtggtgaaataaaattatagacaagttagataaaaaaattagaggttaacttaattgctaaaacatgattgaagtgctgattcaatgactgcacacatatatcaacattttccaaatgcttcactatcaatttgatttcattattgattgtttttttaataaagcagtaataaaaatgaatatattggctgagaaagagcaagaaatggataaataccgacacttgaataatcaaggactcctgaaaatacacacatgtgaacactgattgtagatttcaggtaaacactagaaaaggcaaaattacacaaagttgttatgacaggagggacatcctgaaaacctctctaggcatgtcccacaccaccctggagctgtctcaggggagcagtctcctccagtgtttagaggcacaggcacgcataatagggctaactctggccagatgtgtgatattggacacattgcacaactgctctgttctgtatgtaatttatcttctctacaaatgtaacattgacagttgcattaaatatattctgcaaatatgtaaaagttaaataagctgatgtctgctaaatgattaccaaggcacaatcacataatctgaagttatattttccagagtgataggattacctccagagttttccaggacactctcatctgctccgggcactgccttctcctcagccgtcccacccctgagcttgctatatagtaggagacatggaaatagggcccactctctgctgataaaaaccagcccaaccccgaccctgcagctctgggagaggagcccagcccccgaattcccaggtgttttcatctggtgatcagcaccgaacacagaggactcaccatggagtttgtgctgagctgggttttccttgttgctattttaaaacgtgatctatagagaactagagatattgagtatgaatggatatgagtgagaaacagtggatacgtgtggcagtttctgaccggggtgtctctgtgtttgcaggtatccagtgtgagatgcagctggtggagtctgggggaggcttggcaaagcctgcgtggtccccgagactctcctgtgcagcctctcaattcaccttcagtagctactacatgaactgtgtccgccaggctccagggaatgggctggagttggtttgacaagttaatcctaatgggggtagcacatacctcatagactccggtaaggaccgattcaatacctccagagataacgccaagaacacacttcatctgcaaatgaacagcctgaaaaccgaggacacggccctctattagtgtaccagagacacagtgaggggaggtcagtgtgagcccagacacaaacctccctgcagggccatgcgggtggtttcctttctcagctgcaggaggcgggcttattgttgcaggactctggagacttattaggttgtgatattttactatggttatttatcatgaacttttttattgggaattgtgttttattaatttttattttatatgtaaggttatttttttaaaatacataccttcaagaaataattcttcctaataatttgcacttgttctttttagagttttgttaacatctgttgatatcagctactacatagctatagggacattaatttacatctatagacatatgtgtaaatacacaaacttatacatatatgtggtcttttatatttaatgttataataaaattattataacaattataaaatacatcctaaagaatgaaacatatatagtaatccatattcctttcaatcattgcctatagtttacataaattgatgtctatttgtaaccttaaacatagtgtattggtcattttcaaacatccaagaacaaatttcaaatgtccttgtcacacacacaaaaataaaaatttgaggatttgaggtgatatatatgtcaatcagctcgattcaattattccatattgcattcataaatcataacatagctttattcactataaatacatacaaccaaaatttctcaattttcaatgaaattttaattatacatattttatctgtcctaggtcatgaatgtttttctccctgtccggatgtgattagattgtcctgagaaacaaattcagcttcctgcctcctgaaggcttcaggaagcagctcctagatggggtgaagcaggcaacccgtgtgtgtccacaggacccggagcctctctctccttggattaggccccctcctcaggattacagggctcttcagttttctcaacatgctgttataccagagaagcacaaaacacttaatttcattatatttttcttcaatttttcaaaacaacacaaaggtaataattttaacaataaacatattacaacctactatacatgagacccttcctgtgcttcgaggtttcttctcaggactttgtatgtattacatgttttcagtttttttctgagatggaatgttgacgtctccttattacagattattcttttaatttgtctcttagaataattttttccagagctcctgcccgcccgcgcctggcggaatggagcggcgccagggctgagccaggcgcgcaggggccgccgcacgtgccgcgcggggagcggatgcccagcgggcggagagccagcgccagaggccgggtcggagcggccgctggagcagcgtcagaatgggagaacagcccatcttcaccccccgagcgcgggtcttccagattgaccccaacaccaagaagaactggatgcctgcgagcaacaggcggtcaccatttcctgtttctatgatgtcacaaggaacagctatgggatcatcagtgtggacagcgccaaggtgaccataaacaacacaattacacagaatatgaccttcaccaacacgtcacagacgtctgggcagtgggccgacagcagagccaacacggtgtttggtttggggttttcctctgagcagcagctgacaaagtttgcagagaaattccaggaggtggaagaagcggccaagacagccaaagacaagacccaggagaacatggagccctcgagtaatcatcctgagaatcagggcgtggagccccatcttctactccggcatccagtgtcaacgggacggacgatgaaaggcctctcaggccgctgcagccgacacgcacctgcagtctgggaaccacaagctgaaggcggcctcgacgcagagctgcccacgggaagaggtgggagatggagctgcagacccggcgggagaccgacttccggctgcccacggcgctgcaggagtcgacggccagtgcggagcagaggaagaggccgtgagtcagagtgcgactgtgtctctgagaagatggaggcggcagagagaggatcaaaacctggaagataaagtgcgttccctaaagataggccctgaggagagcaaatcccgacagcgccacctggaggcgcttcctggtggcgctggaccggaagatccaggcctgcataacttccgcccaggcctcccaggctgggcaccaacaactagggctggcagaggcccgggatccccaacgtgagtcctaagtatgtgtgcgagaccagatggcgctaggacgttccctgtgtgcgttgcttctgtaaatgcaggcgccgtgtgtcgtgtttccaaaccagttgtgccatccactcactcctttccagaatagaaatctctcgcttctctggccttgtgaggttgtggacaactggaagattctgactgaggaaaccagaaccaggtctaccttcaacatttacgcagtcaggccagggatgtttatatcgttcataagggttgttggaaccatatgaactgaaaaaaagcattttctcatccaaatattgatattctttacaccaggccatcgggctccttttatccgatagcattcagagtatttgaaggtcctccaggtgccagccttgggggcacagggagaacaacattcctctccgaaaacatggggaagctttaaaataactgtttagtggagacttgcccagagatggaaaacaggtttctggtgagtacattttctggtttgggaatcacctgcatccccgatcctgccccgtgccccccagtttgtatggttgtgacaatgttccatttctttgttttaatttctgagcagttgactgtggtgcgggaacagcacacagtgagggtgcctagcacaatgcctggcgcaaagtaggtgctttataaatatttgttcaattaaaaaaaaagagggaggctgaggcaggagaatcacttgaagctgggaggcggaggttgtggtgagccgagatggcgccacttcactccagcctggcaacagagcaagactccatttcaaaaaaataaaataaaataaataaaataaataaataaaataaaaaatattttttccaagccccactcaaaaccatggtattgttagaggtgtaatagttggaccaacattgaaaatacattccatttagttcatgggcgtgcaaatatccttttttctttaaaaattgttctcagttgtaatattacaaaaaatattggtaatttataccaatgacacaggttaaaatgttgtataaataatttaatgacgtttgattggaaaaaatacatgtgccacatgtcgacaattttttccttctctatgaaatatatactcattaataagtttcagatgttacagttatctttttgatttctgggatttaattttagtaggtatacttgaatgcattttattaattcctataatgatgttgatatttcatgtaggattttaatactaattttactatttactgaattttaaactattctacatgttttatttatataagaaaaaaattacatatgagaaaaaatgcgtagacctgaaatgtatcactagagagtttctgtcaaatgtgaatacctttgttcccaacacctaaggtagcctgaagagcaagtccttccccacaacatgcgtctttttctgtgcttgcggtcagctcctgcatggggaaatgttttgatttctgacactatagatccattttttttctgttttgaactttatataaatgcaatcaaacattttagaccttaatttggtaatgggctacattgctattttttgaggttatttcctgctatttaaggtattaaattagatcaacatattatcatttattcaagtaatggactgactctgatatgaaacctcaaagttttcacatatatatggagagagagagagagagagagagatgagggagagaggttttatatctgagtcagtctgttaaataagtaaatgacagtattttgatttattttcctgtaaatcgactttaaatttgtttccagtttatgaatattataaacaaagctgttacaaatgtcttagtgtaagttttcctatgttgtcttccttttattgagaaaatatgaagtatgtatttattataagcttaaattttttcagttttattgaggtataattgaaatattttaataatgtatagctttaaggtgccccacttgacgttttgatgttgtattagtccattctcacggtgctataaaaaatgcctgagactgagggatttgagaaaaaaagtgtgtttaattggctcacggttctgcaggctgtacaggaagtgtagtggcttctccttctggggagagtcaggaaagttaggatcatggcagaagacaaaggggagcaggtgcgtcacatggccagaccaggagccacaggaagcagggaaggtctacacactgttaggcaactagatcttatgagaactcacacactgtcatgagaacagcaccaggagtttgttctaaaccattcatgaaagacccaccccatgtcccagtcatctcccaccaggtcccaccttcacaattgaggattataatacaacatgagatttggggcaggacacagatccaaaccacatcagatacacattgtgaaatgctcatcatggccaaggtaatttgtatatccattttctcatggagctaccattttatttttttaaaatgtactacatgtgtgtgtatgtgtgtgtgtctcatgagaacacctacgatctacccgttcagcaaaaatcacatttacaatacagcattaaatacaagaacattgcagtacattagatctgcagaactcattcaccctgcacaactggacctctacccttcgaccgacatcatctgatttccctctcctcacaggcctgggacccactattctactctctgctttcaagagcttgaatattttagatcccacatgtaaatgagatcattaagtctttctgcatctggcttattccactaagcatcatgtcctctagccccatccctgttgttgcaaatgtcagaatttccttcttttcaaagcctaataaaattcagttttctgtgtacacattttctttacacattcatcaatctgtggtcattaaattattttacaaatctacactattataaataatcttgcagtgaacatgtgtttgacataataattttatttcttttgaatatatgacaagaagtgggatcaccagagcatatgatagctttatttttcaatataatgaataaccaaacctaccacaccatgcttttgaagtcttagtcatattttatttgcctaggccaatgtcccgaaaaatttctcctacattttcttcagtttgtacatttaaatattgaatccatattcaattaatttttgtctatggtgaaaaactagaagtctagttttattcttctatgtgtggctgtctaagtttttcagcaccacttactgaatagagggttgtttctccattgcatatttttgtcagttttgtcaaagaacaggtggttgtagaaacttgtctttatttcttggctgtctattcttttacattattattattgttattgtttttagtagcagtaccatgctgtctttcttactgtatctgtgtagtataatttgaaatcagggaatgtggtgctttcagctttggtctttttccttgggatttcttttgctattcaggctgttttttgattccatatatatttaaggattttttttaaaacatgtaatcaattatattggttacttgataaaaattgcattgaatatgtatcttgctttggacagtgtattagtctactgtgcattgctataaattaatgcctgaggccaagtgatttacaaagaaaagaggcttatttggcttacagttttggaggctgtgtgagaagcatggcaccagcatctgcttcttgtgagggcctcaggaagcttacggtcatggtggaaggcaaaggggaagcaggcggtgtcctgtggtgagagggggcacagaagaggggaggagggtcgctagactgtttttaacaatcagatttcaaattagctaataaagaaataattcactaattaccatggggttgataccaagccatacctgaaggatcttttccccacaatccaaaaactcctactaggacccacctcaaatattttggatcacatttcaccatgagatttggaagggacaatcacctaaactgtagcatttcactcttgtgtcccctggtctcaaatccttgtaagattgcaaaatcatctttttttaaaatagttcccaaaagtgttaacttgatcaacctccaactgaaaattacaaagtctcgccagggtcttaaggcaatttccctccagctgcgtgctggcaaaatgttttaaagagttatgtacttccaaggtgcaatattgccattgggtaaatattgtcaatacaaaaggaataaattggccaaaggccccacacacacctaaagcctagcaggacagatattaaatcttaaagctacaaaataatctatcttgactttatgttcttagtcagggtacaccaggacaaagtgggtcccaaaatcctcaggcatctcatccttatggctgggcacattccatggggctaataacacaggccagagtcaagtgccagaagtagttccaggttgggagtacaagctgcctttggatctaccattctgggatcttgagggttgtggctgcatttctgtagctccactatgaagtgccctagtggggactctgaatggggttccaaccccatctttccccatctttggtactgccttcgtagaggttgtttgtggtggatccagtcctgtagcaagcttcctcctgggcacatagggttctctacacatcttctgaaatctaggtagaaactgcccagcctccttcactcttgcattctgcatatctgccagaatccagttatcccagcaccatttactgaacacagaggtttttttccacattgtttgtttttgtcagccttatgaagtatcagacggtttaggtgtgcagctttatttctgtttcctattttgttccgtttcttctgcatatctgctcttgtaccagtaccaagctgtttttgttaccatgtcattatggtgtagcttaaagttgggtatcatgatgcctctggcgttgttctttttgcttagcattgctttggctattcagggtcttttttggttccatacaaattttagaatagattattttttctaattctgtgatcaatgatgttgatagttttatgtaaatagtactgaatctgtaaattgctttagacagtatgataatttttacaatattccttcttctaatccataagcatgaaatgttttcccatttatttgtgtcatgtatgatttatttatttatttatgctgtgttttgtagttctccttgtagagatctttcaccttgtttgttacctgtatttccaggcatttcatttgtgtgtgtgtgaatattgtaagtgggataagactgtgttcttgatttcactctcagcttggacatagttgggtatagaaatgttagtgattcttgtacattaagtttgtatcctgagactctaccaaagttgtttatctattttagaattattttggcagagtctttagaattttctatgtgtagaattatatcatcagtttggacagatatatctacttcttttcccatttagatgttgtattagtctatttgcacactataaagaaacacctgagactgcataatttataaagatttttaattgtctcatggttctgcaggctgtacaggaagcatggctggggaggcctcaggaacccaacagtcatgacagaaagggaagcatcatgtcttacatggctggagcaggaagagagaggaggtaggtgccaagtacttggaaaccacatctcctgagggctctgtcatgggaacagcacaaaagagggtgaagcatccccatgatctaatcatccctcaccagtccccacctccaacactgggaataacaatttgacatgaaatttgggtggggatgcaaatacaaaccatatcagctccgttttattttttctattgcctggttgctctgactacgatttccagtagtatgctcaataggagtggtgagagagggcatccttgtcttatttcagttctcaaggggtttgagcttttgctcactcagtataatgttgagtgtggttttgtcatagatggctgttattattttgagttttttttttttttttttgagacggagtctcgctctgtcgcctaggctggagtccaatggcacgatctcggctcactgcgacctctgcctttcggggtcaagcgattctcctgcctcagcctcccatgtagctaggattatggttacgggcatgcgccatcacgcccagctaattttttgtatttttagtagagacagggtttcactgcgttagccaggatggtctccatctcctgacctcgtgatccgcccgcctcagcctcccaaagtgctgggattagaggcgtgagcccccgcaccaggctattttgaggtattttttgatgcctagtcttttgagagtttttatgagtgaatgttggatctcatcaaaagctttctcagcatgtattgagaaaatcatatgttttttgcttttattttgcttacatggagaatcacagttactgaattgtggatgttgaatgaaacttgccttccaggggtaaagcctacttgatcatgacgtatcacattttaaagtgcttctggattctatttgttagtattttgttgagaaattttaggtctatgttcaccaagaatattcatctgatgttttcttttttaattatgtatcttcctgattttgtatcccaaggacacacaatgaaggaaggacagtctcccaacaaatgatgtaaaaactggacatccatatgcaaaataaataaaattagaccttctctaacaccatatacaaaaatcaacaaaaataaacataacatgaaaccataaactcatagacaacatggaaaaataattcatgtcattgattcagaaatgatttatttgaagttaatcccaaaagcaagcccagcaaaaaactacatgcaattatatatctgacaagaagttctatcaaaatgtataaataatccatacaactcaatagcaaatatcaaatgacctcataaaaagagcaaaaacctgaatagatttttttcagaagacacatgcatgaaaaacagagcataaaaatgtcctcaagatgactaattgtcagaggaattcgaatcaaaagcacaatgacatatcacctcacaccacttaaaatggctattatcagcaagacaaaagataagaaatgttggcaagaatgatccacagccataaagagagctttgattggccaagagactgatttcagtaactttctcctgtgaagagaccactgaccatggacttgtcctggccaatttccagaggctgtgcactgtgtgtctttctgcccctgcacaaagcccttttgatatgcaggacccaactgtaattcatttagttcttaagtcctcaccccaaagcaaagctgaaatgcatgtatcatgtgtgtttgcttattagacatgagagcctccactccatgtgaatatccatagctccttctatagcctgctgagtgtgtacactcgaccaatccatttgcacaaatttgtttctcatctttccctctcttaaagtgcctgctcacagtctctgtgggaggctttccttcccagcctgttaagatggccatcctgcagcttcaaccctttctgagaaataaagtctcctttctaaatttataaactgggtgattcttccgttgaaagcacaagctgttgggaagagttatatggcaattccataaatgcctggaagacaagtgtggatagggtagggtaagaagtcctgggggctgcacaccccactctgatggaatttccctccagaaacttctgggttctcaagatgagaatccaaacagattccctcatggctctgtcatcaggagaactatactctgataagtatgcccagaacttcctccagacagaccctatagggaaaaaatacttttcaagatctttattctgtgaggggaagggattcttttccatcccagacagcttcatcttagccttcctgagtcatgaaaaggagtataattaataaaacatctggggtcagattcaagaaaataatctgtggatgctgcagccaggagggggagtggaggacggaggaaaatcagctgtaccactgaatactccttgtaaatggtacagcctagagaaagaatagcaagaaatcattggaattcaatttccagaacatatactgctcccctacccaccacatcacctcaccaccaatatgattaatctggattaaagagaaaagtgtggaaaggcacagactccatctaaggactagaatttagggaaaccaaaggcagtgggagagaaaaagtcaaggacagtaaagtgacttaaaacctcttagaccaacagcttcaggaacaaggtcacatcctctccctcactgaaattagatttacctctcatggggcatctgcagggtgcgcaggtgagaactggcaaagagaacatgaaggcactttccaaatctccattagtacctagctcgctttagctgtttggaaaaagcaaaaccacaacaaacataaccaggactaggatcagtgttggaagcacttttcactggcaagacactaagaaggagggcaaattcgaggccagttactatgcaaatatgccactgtgagtgtgtgtggtggtgagctttgagacatagggtctgtgggtaaagttataatcgataaaatcttcaaccacagaatcctaaaaaaaagagccttccccaaagtcccatcagttcctggactcgccatgtgtctggaccgtatcagtggatccggagctccagggaaggggctccctgatggcttttatgattccttgcttgccgtgctgaggtctccctgtagattatgttgggttttctaaggcctattttctattgtaagaggtggtgggggaaacaatttctgtcactgaaagagcattctgagccagggcacagccccttcctactgagcttgagattctgggaggaaaaagttctctgacaggaggaaaaagttcccagacaggaacttccctgcagggcaggagctgagcggcagggggcgctcagggagcacccagcacaggacccagccctggggcaggtgcacaggaggctggggcagggttttctctcaggaattgaatgttccttatttcaaagcaataatgacctaacatttaaataagaatttagcaagtactgatgtgcctgtaagtattttattgtatacgcagcctatacctaacccaataatttaatgcaaaccggatttaaaaggagaaatgtctaggtctttcaaatgtatttctagttaggaattgaggggtggttttattaattcaatgggtgttactgtccggagacacactcatcccagaagttagatgtgcagagggcaaggctcaggaaaagttcaggtagacagtgagccatatgaacagggaatcacattgaggaccatgtcctgtgagattctgggtttctgtgagaggagttctgtcttcatggacttctgggcatgtcagaggacaaatattaaacaaagttcagggcagggagctcagcatcccactgtggcgtggtccacatgtcacctatcttcttcctcagggtggcgtggcctgagctatgaaaaacctgcctcatgaatatgcaaatgcactgctgtctaccgaggtaaatacagatctttccttgcccagagaccatcacacaacagccacatccctcccctacagaagcccccagagcgcagcacctcaccatggactgcacctggaggatcctcttcttggtggcagcagctacaggcaagagaatcctgagttccagggctgatgaggggactgggtccagttaagtggtgtctcatccactcctctgtcctctccacaggcacccacgcccaggtccagctggtacagtctggggctgaggtgaagaagcctggggcctcagtgaaggtctcctgcaaggtttccggatacaccctcactgaattatccatgcactgggtgcgacaggctcctggaaaagggcttgagtggatgggaggttttgatcctgaagatggtgaaacaatctacgcacagaagttccagggcagagtcaccatgaccgaggacacatctacagacacagcctacatggagctgagcagcctgagatctgaggacacggccgtgtattactgtgcaacagacacagtgtgaaaacccacatcctgagagcgtcagaaaccctgaggaatgaggcagctgtgctgaggctgaggagatgacaggatttatgaagtttaaatctgtttagaaaatgggttgagtaattgagtaaaacagcaatggaaagatgtgtacactgtcattatgtaggaaatagtattttcaactgtcaccctataagtaacactcacagagtgggaaaggcagccatcaatcaagctgatgcaaacattcccatgggggctttgtggggacatacattttataattggatctataaatcattagaaacaggattgcttgatctcatggtaagactaaatataatttccaagaagtggccgaaatttcttccaaaatgtctttgcccttccttttacattgaatttattttaaaggagttttaggatcacaacaagtttgagtagaagaaacagagttcccatgcactcctgccccccgacgctcagccttctctgctatcaacaccctgcaccagtgtcataaatcggttacagaggatgaatctccacagacacattggttgtttccttttctggtggtccctggtataacaagcctcaactatcttgaagcaccccaggttcaagtggattcttcaagtgggttactgggaatgatgccaggtagaaggaaagtgggtgggaccattcctctttgcactctttcctcaaggatccataaaatgtacatttacatggagctcctctttctcctggttttatatgcctcttccccaatggtaaggtttcccagtgtttacagcgggggtccccagtccccgtgctgtggatccgttaaggtgtgcagtgcgttaggaactgggccacacagctggagatgagtgggggcgagccagcatcgctgcctgagctctgtctcctgtcggatcagctgtgcattagattctcctacgagccgaattcactttttttatatatatactttaattctagggtacatgtgcataacgtacaggtttgttacataggtatacatgtgctatgttggtttgctgcattcatcgaattctattgtgacctgcacatacaaggggcctagactgagcgctccctatgagaatctaatgcctgacgattgcagggggaacaagttcatcccaaaaccacccaccgccatcatccatggaaaaattctcttctaccaaactgttccctggtgccaaaatggttggggacactggtgtagaggcaggtctgtaccttggaaagccagcagcttctggtgaatcccataattaatgtcctttaatgagaagtggagactttggtcatgagggccttcgtgaataatgccctacagttggattcaaaacattgtaagctcttggggggtgtttctggataaagccctttgtgcagaaaatgcagacacatccatgggatccatgcaggaaaaaagcttcctttacaaagtggtttggcacctggaaggagctctcagggttgggcactgtaccctttgctggctgcactttagccagaggcttaagcctgattggtcttgcagtgggagagccttcctggggtcaaaggttacaaaaatgcctgtcatcttccagctgagcaagcccatctgcgtgcttgtcagtgtcaaccccatgaagggtgcactctggaagatgacaagatgcacacaaacctcctcccactgattatccactaccacacactcagctgcaacccgtgctccagaaacggacaggggcctgcaaggataaacagaatggaagtattttattacctgggaaagcactgccaaatgccacgtttcaggaaggttaactcataagtgttcaggaagtgactgaagggcagtggtgggtgaggtgacgggactgcctcagggctgcacatgaggagggctccctcccacacagccttttcctccaggagctgcaccaggaactcacagaggatcaggaaggattctgagaacattcttctgtggcgctgactagaggggcaaaataaattataaaaaataaatcaattctaaatataatatgatgtttgttattagaaactatttctggatcctgtgggaaccctgacataagccaccattctctgtgaacaaacatttaacctctccttccatggggaggtcgacgagcttggattggttctttcatggatagtatcccccaaactcctctccactccctgcgtatccccgggtctctcagtgacaagttctcctcagtggaatttggttgatgtagtgagatcttcaaatttcctgtcgtctgtgttctcatgttctccccttatctgagattaagaaacgcacctgcatgtagtaaattatagcctactgtctctcatggacaaaataatggccacgccaaccaaccttgtggctgacagcaaccactggcggccaccatcccctccacagcctgtgttggaacatcacctgagagattgtgttagcaactttccttcagaatcatcttaaaaactttgtgtcccatttcacatggagacgtcatttttccatttcatcttcatagagaaatagaaggagaagaataccaaatacacttcctatctccagattattcaaatataattgtccctttatcaccttctgatttctggtcttcacagaatactctacaaatttttctcactggcgttataccaaaagttgtgaagcaccagatactgggattaatttaaccaacattattattctaataattcttagaatttagaattacaattatcatcttttcgtatacggataaactaacctatgcctttgaaaataagcccttacatgagagtgaaaagctatagatttggaggatttccttgcaaatccaatatttggaaaacggattttatcacaaatatacaaattaacttacaattgaacaacaaaaccacagaatttaattttaaaatgggcagagacctgaatagaaaccatatccaaaaaacaaacataaaaagtgatcaacttgattttcattaggtgtacttatgtttaatatttaaaaagttctactaaactatgagaatgggtaaaaattacaaggtagacaatatcagatggtgatgaggaagttgaaaaacaggaactttcaccccttgctggtgggaatgccgaaatggcacatagaaaactacagttaataatttattgtatatttcagaatagctacaagataagatttggaatgttcataacactaagaaataatcagtgatatagatgaaggatatcctagttatccagatttgatcactgcacataaaatgcttttatcaaaatatcagttgtaccacctaaatattttgaaatattgtgtatctatataaatcaaacattaaaaaacaccaatgcagtggaatccagctaattgcagattcccattagatgggatgtgctgcatgatctgtaaactaatcagaatctgtgggtttgtaaaggactttagaaatcaactaggctgcttgtttctaaagataagtctccctagtttaaatattttcttaatgggtggcgattttgaacatagaagaaatagtaatatttgtgtcttgtaagttttcttcttctcgtgtcacgagaaaaggtttgcagggaggaatctgggaccatctttcaagtctcaacttcactgtgattacctcagtaagtattttctgatacccctgactaagataagtctcgtatctgtcctagaaactaaaagtagaattctaagcatctacctgaccagatggacccttcctcttcaccaaggagttccagagacacttttaaacctagctccggccgtgttagaaatagaggatcagaaatgcctcattataccctcctccctttggaattcaagcacaactaaccagcatttttatgaaaacagagcttaaggctcagaaaacagattatttgtagcagtaagataccaaattctaaccttattcgagaatatcatcacaggacagagagcaggcattgaaaggaatcaaaggcttttaccctaaaatatattcctttgacatattttaaaatagccaggcacagttatcttttgtgagagagatttacattctgtagagaatctccttccctttccaggtctttttcttataccgaggagattagctgagggtctagcttcttttaaaggtcttaggagaaaacatttcccagctattgcctctaaaggtggtcacataagagacttcatctacatagtaagaatcttgttctccaaaacctgttatcttaacctagaaacatttttctaccggtttcaggtctttagaaaaaagcttaaatctttcaatcaattgtcaatcagaaaatattcgaactcactgtaagttgtaatccccgccacacactgcctcacttctagctgttttgtctttatggaccaaatcaacatatatctcacatgtattgtttggtgactgtctctctagtacactaaatttaagctgccatcaagccactttgggcacatgttctcaagatcttctggggctgttcacagttcatggtcctcacattcgcctcagaataaatctctctaaatattttgcaaggttgctttttcatcagtagttctaacagaacctactctgtggtttttgttaaaagcattatattaatatagtattagtaatattagtattagttataacacatgttggaaaattcttatgaagttatgcatagactaacaatgggatcaagtgtaaatgtttcaaagtatttaagcaagttatttcaaaatttatcttctgcagatacttctatcagattcattatatcagctaattacttgctttatgatttttgcattttattgtagatgatcacaccctatattttcttggcctttattgtagaaaattgtgtgaaactagtcagggctacatttgcaagtaattgtcgcagtggctgcctgaattgcagtgggtttcctctgcagccaccagtcactcagattactccaatgacaccttaattttgtttcctgcttggctttgggccttagtcttgtgctctccagacagactctgtctttcatctcccctaggtcaggccagagccacatggacctgatgattgtcaatatggtgggaagggtcgcactgaacgggcactctctgtccttctgagggagccatactgcaggcagacatggcagtcctggctcagggtgtgtccttccaagtatccctgcccttccttcaggtgtgatgctgatccatgcatcttcctcccattcctgggtagagggtctccttgttctttccccaatcttctcccagcagccactatgtcttcccactgatgtcttcagcttcctcttttctgcccttcccagcagatgagtctgttattcctgagggaagagagaggaggtgggagatgaggctgttattcctgaaagaatggacagagctttggagcttttctttcttctaccccagtttctacgagttcctccagtgcctgtaacacagagctgtcagtggctttgcccctgcatgttaattctttggtcatgtagtggtggtgagggagctgggtctggatgcatttcagccacagctgctgttccacttccccacacagaaccgtctcaggaggaagaggttggagatttttctgatgtgtcctcaatcctgggagaaaagttttcaatagcaataggaatctctcagttgtatgtccgctgagaatttaaacaataacttctttataatactaaattttaaacaatccaatgaatatatctaatttaattttgtattagcttatgtgacatttgctggcctctcccccagataaggtcatattctcttcctgtttgttcctgcaagtcactgaatttcacaagatgtaaggtctcttgattatactataacatcaataatctggtgtactaaagaaaatgtgctaatttgcagcttactaaaattagttgttttagtaaaaataatatatttgttatagcatgcctacatctccaggctgagtagaagctttgtttgtaatactcagaaactgcaaataacacacatattaaggagctttctaaataaatactatgggtgaattctttaactggaatactgttcctcattagaatcaacacattctttatacacaaccaaattactgactcacaagtaattatactgagcaagaagccacacaaatgaaattgaaaatataagatttcactttaacaaaatcttgaaaaatagatctgaattaacaaagatgagaggttgactcagtatggtgagagggaaataatggggaggcaggaatgagaggaacacagggaggcttttaactgtaatcatcgttatctcgattgttattttggatacacaggtgagcacacgtgaaattacgttttttttccttcggagacatggttttgctttgtcgtccaggctggagctccgtggtgagatcatagctctctgcagcctcagaccctgggtctccagcaatcctcctccctctgccctatgtagctgggactacaggtgtgcaccaccatgctcggcttcagtgcgtattaaaccgcacacttcaattatgcagtatttattatatagcaataatgcctcaataagggtattacaaataagtggatagataatttgttaaagattgatggaaagatagataccaacatgagaaatgtatgacactcaagaaaataaaactgtaggaaacttgcttttctttatatttgttaggtaatcaccacagtgtgtacacatcacaccatgttcccattacagagaaaaggttctgcgaacctcacgagctgtgacccctgtgtgctgggcttggttcagggagaagtcaggtccagtggtgagaagcacaggcccagatgcccaggctcactctgaccaaatgtgagcactggggacattgtaaaacccacctgtgcttttgctgataatttttcatctttaacatggaaataatattgatactatataccatggtttctctgcgtatgtaaaaataaaagatgattggtgctaactttaaaaatatgcagtttatgtagatctatggtacctcaataaaactgttttaaaataaaaattacaaaattataagattttcaggttttaaggtttaagtttatcacaaaacaaactgacaataggaaagcacaatttcccaatgctttcaatatcacagatctccccgaggacattctgacatgctctgagccccactatctccaaaggcctctcaccccagagcttactatatagtaggagatatgcaaatagagccctccgtctgctgatgaaaaccagcccagccctgaccctgcagctctgagagaggagcccagccctgggattttcaggtgttttcatttggtgatcaggactgaacagagagaactcaccatggagtttgggctgagctggctttttcttgtggctattttaaaaggtaattcatggagaaatagaaaaattgagtgtgaatggataagagtgagagaaacagtggatacgtgtggcagtttctgaccagggtttctttttgtttgcaggtgtccagtgtgaggtgcagctgttggagtctgggggaggcttggtacagcctggggggtccctgagactctcctgtgcagcctctggattcacctttagcagctatgccatgagctgggtccgccaggctccagggaaggggctggagtgggtctcagctattagtggtagtggtggtagcacatactacgcagactccgtgaagggccggttcaccatctccagagacaattccaagaacacgctgtatctgcaaatgaacagcctgagagccgaggacacggccgtatattactgtgcgaaagacacagtgaggggaagtcattgtgagcccagacacaaacctccctgcaggaacgatgggggggaaatcagcggcagggggcgctcaggacccgctgatcagagtcatccgcagaggcaggtgcagatggaggctgtttcctgtcagggtgtgggacttcatcttcttctgacagtttctctagtgaacctctctaacctcagaattctgtgcttactaatgtcatctctacgtattttttaaaagatcattttaatatgagcacctattctcacacgcaccaaatgcagattgacgcttacagagatgaaaagttctcaaccatggtcaccaggatgagagtcctgaggaaattcaggggtgcctggtgactcttccgcaatcagtcctgggacagaaacctcagggacagcctttatgagttttgatcacatctaacagagaggatgggccagggccagagtcatgtagaacctcacaggttccacgtctgacccttctcctgacactaaagccaatcagcatcagcactgacctggtgctccttttgctcccaatccatgttctttctttggagagtttcttctcccttttttatttgcttttcctctttcctgaaaaagaaacagatggtccccttggtccacattccagggctcaaggcattttcttggagctcaggtggggctcaggctgtggctcctgcagccacgtgggagaggctgatgggacttccttctctccccattttctcaggaccctctactgtgttgtgtgtaggctcatctgggaatgcagttgaccattaatactgaaggggacaaactcatttgatcaaaatgggatgtggatgtggagttaaccctgttccgtgcacagtgtcagagtcgtctgcttcagaagtagtgttagaaagagctggtgaaatttatcagaatcaagatggagccacttgtgttaaagccctaatgaatgaagctggggaaggccatgaaggagggttctaacacacatattcctgataataagaactaccataaatagactctgcacaaccataaccttgcacagaagccaccacaacattaaaagaattacttctcccattgtatctgcccagcaactccctgttcaactttacaccgatgtgcccctgttattgatccttctagcccaggacaattgtcttaaacagctgatgtgaccctcctcatttttcctttattctttatcttcctataccaacctgaatgcacccatacatttcaattgcaatacacttcctagaatacatattattatattttagagtctctctctctctgttattcagggttgacaagctacagatggacatgccactttctttttttatgactttttttaaaaattttattattcttgtactttaagttttagggtacctgtgaacaatgcaggtttgttacatatgtatacatgtgccatgttgttgtgctccacccattaactcgtcatttagcattaggtatacctcctaatgctctccctccccactacccccaccccacaacagtccctggagtgtgatgttcctcttcctgtgtccatgtgttctcattgttcaattcccacctatgagtgaggaaaaaaatgatgagttcatgtcctttgtagggacacggaagaaactggaaaccatccttctatcattctcagcaaactatcgcaaggacaaaagacatgccacttttctgtgagatgtggaggatgacagtttttggagatgtctgggaatacccagtgtccagaagatcatccatcaataagtgcaggctggaggtcccagagagaggcaaagctgctgaaacaccatggaatttcattttctccagttctgctctgatggaatcaggcccacctgttttgcttgtcttaagtaaattcacagcaccacatatattagtgttgcagtgaataactacaaagtctatcctaaccaagtgtaccatcaaatttaccattacccagagggaagaatctttaacatgagatctatgttcataattttttaaggtgaaaaagtgatcactatccaatcaggcaaatatgattttgctaatgagtggtagatgttgcatgtatttttggatgtcatccctttttcagatgcatggcttgcaattatattttcccattctgtaggttggaattatttccacactttgtagaatctttttgttgtgatgtagttccacctgtttaattctgcttttgttgtctgtgcctttaatgtgaaatataggaaatcattgttaatatattattttctgggtcggggaaattttacaattgcaggccatatgtttaaatatctggcccattcagagtgatttttgtgtttattctaacccaaaattcttaactctttgcatgtgtacatccagtttttctaacacattcatagggagagacttggtttatctgttttatattgtgggttcttatgctgaaaatcagtttgccattgatacatcagtttatttctgagctctttctacatatttatgccaactccatcctgtttttattattctacttttgttattacttttgaaatctggaagtaagatgtaagtttatttttgcctttttacagatgctatagcaaaatattttaacctttcactcttccatataaaagtatggctttaaataatgacttttattatatacaggttatattcttgtattcctaacttttagaggttttattatgagatcttgaattttttaaatgttattttctatgtctggtgagaagttaactgatgcttttcctttattctcttaatttaccacatcagatttattgatttgaagatattgattcatcagcgcatctcaaaaataatttggagcttgtcatggtgtacaatccttttaaagtcttatagaacttagttgactatgaattgggagtagcttgtttatatatactaagaacatttgtcagaagctctttcttgtttattcccagtttgcacttacatatactataaaacataatatataaattttttattcctttcatagttatataatatagcaattacaaagataaaaactgcacttcatcttgattttcccattttgtacagtcttaatttcttcgtatagatttatgttttgaatgtatatcacacggctactagcagagaaagtttgttaaaatgtgcactgaagcatgaatgtgctgacaataaattgtctcaagatctttttgtaatgacagaattttatttgcctttcacttttaatgaaaatgtaatgcacatagaattccagtttgcatttcacttgtaatttattttcttgtgtttattattttgttcatggagatgatcacacattacattctgctgggcctttattaaccacatttctatgaacctagtcagggttggatttcaagtgtatggttgccacggctatcagagttgaagtcagcttctcctgttcacaaaaagttcaggttcctccagtgatacccacttttgtgtcccggtttggctcttcccatttctttctccccagagagagcctgtctctttcatctgtggcaggtgcatcctgctgacacttttacttggtgattgtttgtggggtgaaagggcttggacacagggggatgttctccaaccttctgaccaagcatccttcttagctatgggtggtgagaatggctctgaagcatggtcttccaagcgttcctgttccttcccttccccaagtcagagtgtctctttctagccacagtggtcttccatcagtgtcctcagcttctgacccactgtccttactccacagactcaggatttcattcctcaggaaagagacgggaggtgtttctgggtagagtctccttagtgtcctctgtttccttctgttctagttgattctaccagtgcctgaaggacacaagatttaataaatgtctcccacatatcgtgaagagggattcagcattgaacggagctactgttcttcctccccagtcaacatcacaggacagcaggtggctgagttgtctggggatttctccaattctgtaggaaaagcccgcaagtgccaggagtttcacactctcacagcattagcacacacatcctcaacaactcatgaaacatttccaggttagctttttcctatcttcaataccatacaatgagtggcacctgccccaggtactctaataaatggacctagttttctctgcaggctccccattttctcagatttcaggggtttttttctctgcaacatcaactcagatatgttgaagggttcattttttgtagttcttcaagtttcttgttaatgaggtcagaagaagatcattttctcatttttttttttacattcccgtgcttagtatctgctttctaaataaaattcggaaactaagacaaaatatcaaatatccactatttggtgcattgttaaactatttgagaaatattcatgtactgaaatacaatgaacaattgaaatcaaggcatgcctcagtcacataagaatgtgaggacattatcaaataattgtgctgagtgaaggaagctaaagaattcacagtaaatctcctgtgatttcttttgtataaattgtagaaaatgcaactattctaaattaacatggagaagatctgaatttttctgagaaaagtgtggtgaggtaacaagatggtgaaataaaattacagagaagtgagagaaaaaaatttggaggttaatttaattgctaatagcacgattgaagtgctgattcaaaggctgcacacatataccaacattttccatatcgtacactataaatttgaattcactattgattgaatttttgaataaagcagtaacaaaaatgagtatattggctgaggaagagcaagaaagagatgaatattgacacttgaataatcacggactcctgaaaatacacacatgtgaacactgattgcatatttcaggtaaatactagaaaaagcaaagtcacataaagtcgttatgacaggtgggataccctgcaaatcacactaggcatgtcccacactgccctggagctgtctcaggggagcagtctcctccagtgtttagaggcacaggcacggataatagggctgacgctgtccagatgtgtgatattggacacattgcacaactgctctgttatgtatgtaattcatcttctctaaaaatgtaacattgacacttgcactgaatatattctgcaaatatgtaaacattaaataagatgatgactgctaattgatcatcaagtcacaatcacataatctgaagttatattttcctgagagataggattacctccagtgttttccgggaccctctcatctgctctgggcactgccctctcctccagcgtcccactagagcttgctatatagtaggagacatgcaaatagggccctccctctgctgataaaaaccagccgagcccagaccctgcagctctgggagaagagccccagccccagaattcccaggagtttccattcggtgatcagcactgaacacagaggactcaccatggagtttgggctgagctgggttttccttgttgctattataaaaggtgatttatggagaactagagacattgagtggacgtgagtgagataagcagtgaatatatgtggcagtttctgactaggttgtctctgtgtttgcaggtgtccagtgtcaggtgcagctggtggagtctgggggaggcttggtcaagcctggagggtccctgagactctcctgtgcagcctctggattcaccttcagtgactactacatgagctggatccgccaggctccagggaaggggctggagtgggtttcatacattagtagtagtggtagtaccatatactacgcagactctgtgaagggccgattcaccatctccagggacaacgccaagaactcactgtatctgcaaatgaacagcctgagagccgaggacacggccgtgtattactgtgcgagagacacagtgaggggaagtcagtgtgagcccagacacaaacctccctgcaggggtcccttgggaccaccagggggcgcccgggacactgagcacggggctgtctccagggcaggtgcaggtgctgctgagggctggcttcctgtcgcggtctggggcggcctcgtcgtcaaatttccccaggaacttctccagatttacaattctgtactaacatttgatgtctctaagtggaaaacgtttttgtcctttttgtttctttgtttttgtaacaagaggaaacatcctcagctccacagaagccagggtgtcactttggggacagaaataatcctttcatggtcaccaggataagagtcctgaggaatcccagggaaacctggagagtgttttccagttagactcagggcagagacctccatgggaatctctgattagaacaggccttgagctctgacgggagccaagagagaggctcgcccagggtcagagtccttaaaacctgatggttttcacagctatcccccctcgtcttgtaaactcagactgattcagttgaccctctttctgctaatccatttccttctctgtaggtttgattctcacagttcgctttcttcttctcttccctgaaaacagacgatgtgttttctgtagtcaaaatcccagggctcaggtctgcaggacctgggtaggctacggggactttctcactcaccattgtctggacactcttgtcttctgtgcatggaggcatttggaaaatgaagtggacattagccatgaagggaataatactagttttctccaataggatattgatgtagagctgatcttgtgcttctcacactgtctcagagtttggactttcacctgtgactttgagaagagctggggatgggcactccattgtgctgtgagctctgggtaacgataattgtagaatctgcctaggcagtctaaggtcaatactactggtcatcaggaaagacagctggaattcctgggaagatctgcatctgccgtccaccatggagtcccatcgtcttctgttatgctctctttgaatcagtcccacctagattatctagaacactcttcctgacttaggaaaaataatggcaggctccactaacacctgtgttatgccatgggagcaacacctaagctagtgtgtgaatgagtagatgagactgtggtctagtcaaggtgacaggtaaaattgattgttgccattatgatattttattttatatttggcaatatagtcatgctcctattataaatattttttgagacggagtcttgctctgttgccagcctggagagtgcagcagcacgatctcggctcactgcaacctcttccacctcccaggttcaagcagttctcctgcctcagcctcccgagaaactgggattacaggtgcacgccaccatgcctggctaatttttgtatttttagtatcgacagggtttcaccatgtgggccagtgtggtctcgatttcctgacctcgtgatctgcacacctcggcctcccaaagtgctgggattacaggcatgagccaccacacctggcctagttttattaatgtctgtccataccagcaactacatacctatggggacattaatttacatctgcagacagatgtgtaaatacacaagcctatacatacatgtgtagccatttatatttaacattataataaaataattctaaaatattttctaaagaattaaacttaatgatgagctaaatataaattagagtaatctataattgatttcgatcattctctatagtttgcataaatggatgtctatttctaagccttaacatagtgtattcgtcattttaaaacagtcaagaaaaaattacaaatgttcttgtcacaaaaaaagataaggatttgatgatttgaggtaatatatatgtcaattaacttgattcaattattctgtattgcattcacaaaccataacatacctttgtgccccataaatatatacaaccaaaatttctcaattttcaatgaaattttaattatatatttttaaatctgatgcctctccttggattaagccacctcctcaggcttacagggctcttccattttctcaacatgctgttataccagatgagcacaaacacattaatttcattatgcttagctttaatttttcaaaacaacatgaaggtgataattttaccaatagacgtattgcaacctactatgcatgagaccctttctgtgcttcaaggtttcttctcaggactttatatgtattgcaaattttcatttttttctgatatggaatgctgatttctctttattacagattatcagtttatttttcaaatttatctcttaaaattaattttttcaaagtcccactcaaaccagggtattattagaactttgaagtgtaatagttggaccaactttgagaatacattcaatttagttcacgtgctctcaagtatcttttcttctttaaaagttgttgtcagttgtaatatcacacaaaatattagtaatttatactaatgacacaggttaaaatattgtataaataatttaattacatttgattggaaaaaaggaatatatgttcctcatatcttgacttttttttcttctctatgagatgcatgtttattaattattaagtttaagatgttacccttgtctttttgatttctgggatttaattttagtacatatacttgaatgcattgtattaattcatataataatgttcatattttggatagggttttaatattaattttgttattactgaattttaaactattctacactttttcattttttgtttttatgcgataaaatttacatataagaaaatatgcatagatctggaatgtatcactagagagtttctggcaaatgtgaatacccttgtccccagcacctaaggtagctgaagagcaagtccatccccacatcgcgggtctttccctgtgcctgcggtcaactcctgcatggggaaatgttttgatttctcacactacagatccatttttttccgttttgaactttatataaatggaatcaaacattatagaccttttttttgaaaggggcttcgatatttttgagattaattcatgctatttaatgtataaaattagatcaacatattgtcatttattcaattcatggactgactctgatatgaaacctcaaagttttcatgtatatatggagacagggagaggaaggagaaagattttatatctgagtcagtccattaagtaaataaatgagaatattttgatttattttcctgttgatgtactttaaatttgtttccattttatgaatattataggcaaagccgttacaaatatattagtgtaggttttcctatattgtctcatttttgttgagaaaatatgaagtatatatttctttttttatttttgattactatttatttatattttatattttactttaagttctgggatacatgtgctgaacatgcaggcttcttacgtaagtatgcatgtgccgtggcggtttgctgcacctatcaacctgtcatctaggtttgaagcacctcatgcattaggtatttgtcctaatgctctccctcccctttcctaatgcttttcctcccctgacacatcccagtgtgtgatgttcccctccttgtgtccatgtgttctcattgttcaactcccacttatgagtgagaacatgtggtgtttggttttctgttcctgtgttagtttgccgaggatgatgatttccagcttcatccatgtccctgcaaaggacatggaaatcattcttttttatggctgcatagtagttcatggtgtacatatgccacattttttcatacagtctatcattgatggacatttgagttggttccatgtctttgctattgtaaatagtgctgcaataaacatacatgtgcatatgtctttatagtagaatgatttataatcctttgggtatatagccggtaacaggactgctgggtcaaatggtgtttctcgttctagatccttgaggaatttccacactgtcttccacaatggttgaactgatttacactccccctcaacagtgtaaaagtgttcctatttctccacattctcaccagcatctgttgtttccagactttttaatgatcaacactctaactggcatgagatggtgtctcattgtgattttcatttgcatttctctaatgaccagtgataatgagctttttttcatatgtttgttagctgcataaatgtctttttttgagaagtgtctgttcatgtccttcgctcactttttgatggggttgttttttttttgtaaatttgtttaagttccttgtagattctggatattagacctttgtcagatggatagattgcaaaaattttctcccattctgtaggttgcctgttcattctgatgatagtttcttttgctgagcagaagctctttggtttaattagatcccatttgtcagttttggcttttgtcgtaattgctttggtgttttagtcatgaagcctttgcccatgcctatgtcctgaatgatactgcctatgttttcttctagggtttttgtggttttagattttacatttaagtctttaatgcatctagagttaatttttgtataaggtataaggaagggatccagtttcagttttctccatatggctacccagttttcccagcaccatttattaaatagggatcatttccccatcgcttgtttttgtcaggtttgttgaagatcagatggttgtagatgtgtggtgttatttctgaggcctctgctctgttccattggtctatataactgttttggcaccactaccatgctgtttttgttactgtagccttatagtataatttgaagtcaggtagcatgatgccttcagctttgttctttttgcttaggactatcttggctatacaggctgtttttagttccatatgaagtttaaggtagttttttctggctctgtgaagaaagtcaatggtagcttgatgggaatagcattgattgtataaattactttgggcactatggtcattttcacaatattgattcttcctatccatgagcatggtatttatttattataaaagtaactttaattttttcagttttaatgaggaacaattgaaatatttttaaatgtatatgtttaaggtgcaccacttcatgttttgatattgtgttagtccattctcacactgctataaagaaatgcctgagactgagtaatgtgaaacaaaaaaatagatgtttaattggctcatttttctgcagactgtacaggaagtgtagtggcttctccttctggtgagactcaggaaagttagaatcatagcagaagacaaatagtagtagacacatcacatggccagagcaggggccacaggaagagagggaggtctacacagttagacaaccagatcttatgataactcacacaatattatgagaacagcgccaagagtcagtgctaaaccattcatgaaagacccaccccatgacccaagcatctcccactgggtcccagcttcaggattgaggattataatacaacacgagattcaggccaggacgagttgcaaactgtatcagatacacattgtaaaatgctcatcatgatcaaggtaatttgtgtgcctatcatcccacatacattttttttttaaatggagtgtgtgtgtgtgtgtgtgtgtgtgtgtgtgtgtgatgagaatatctaagatctaccctttcagcaaaaatcacttttacaacacagtattaaatacaggaacattgctgtagattagatctccagaactcattcaacctgcacacctgaaattctgtaccctttaaacatcacccaatttccctctcctcccacatcctgggacccattattttactttctgctttcaagagcttgggtgttttagataccacatgtaaatgagataatgcagcatttgtctttctgcatctggcttattccacttagcatcatgtcctccaggcccatccgtgttgttgcaaatgtcagaatttccttcttttcaaagcctaataaaattcagttttatgtgtacacattttctttatacattcatcagtctgtggtcattaaattattttacaaatctacactattataaataaccttgcaatcagcatgtgtttaacataataattttacttatttgaatacataacaagaagtgggatcaccagatgatatgatagctttatttttcaatttattgagtaaccaatcctaccacaccctaaaaggattctcttttcaccacattcttgccaatatgtgttatatgtcttgctgatgatagccattttaagcagagtgaggtgataactcatcatgattttgatttgaattcctctgataattagtaatgttgagaaccctttgaggctctgtttttcatgtgtgtgttttctgaagaaaaacctatccagtttttgccctttttatcagatcatttgttatttgctattgagttgcatgagttatttatacttttggatagaacttatgtcaggtatataattgcacatagtttttttcctgtgcttttttctattaaattcaaagaaatcatttctgaatcaatgacaggaagtttttttccatgtgttctatgagtttgtggcttcaggttatgttcatttttagtttatttttgaatacggtgttagagaaggtctaattttatttcttttgcatatggatgttaagcttttacatcatatattgaggagactgtccatccttcactgtgtgttcttgggatacaaaatcaggaagatgcataatttaaaaagaaaacatcagatgaatattcctggtgaatatagaccgaaaagttctcaacaaaatactagcaaatagaatccagaagcactttaaaatgtaatacctcatgatcaagtaggctttacccctggaaggcaaggttcattcaacatccacaattcagtaactgtgattcaccatgtaagcagaataaaagcaaaaaccatatgattatctcaatagatgctgagaaagcttttgataggatccaacatccgctcataataaaagccctcaacagactaggcatcaaaaaaacttacctcgaaataataagagccatctatgaccaatccacagtcaacattatactgagtgagcaaaagctcaaaaccctttagaagtgaaagaagaccaagatgccctctcaccactgctattgaacatagtactagaaaccctagtcagagcaaccaagcaatatcaaaataaaaggcagctgatatggtttgtacttgtgtccccactcaaattaaatgtcaaattgtaatacgcagtgttgagggtggggcctgatgaaaggtggttagatcatggggatgagtctctctctcgtgctgatcccatgatagagccctcaggagatctggtttcaaagtacgtggcacctccctcgtctttcttcctcctgctccagccaggtaggacatgatgcttggcgcg

SEQ ID NO: 9 - DNA, 172895 bp, synthetic construct
  misc_feature 1..172895: note = BAC3
  source 1..172895: mol_type = other DNA
ggccgcctggccgtcgacatttaggtgacactatagaaggatccgcggaattctctttcttgtttattcccagtttgcacttacatatactataaaacataatatataaattttttattcctttcatagttatataatatagcaattacaaagataaaaactgcacttcatcttgattttcccattttgtacagtcttaatttcttcgtatagatttatgttttgaatgtatatcacacggctactagcagagaaagtttgttaaaatgtgcactgaagcatgaatgtgctgacaataaattgtctcaagatctttttgtaatgacagaattttatttgcctttcacttttaatgaaaatgtaatgcacatagaattccagtttgcatttcacttgtaatttattttcttgtgtttattattttgttcatggagatgatcacacattacattctgctgggcctttattaaccacatttctatgaacctagtcagggttggatttcaagtgtatggttgccacggctatcagagttgaagtcagcttctcctgttcacaaaaagttcaggttcctccagtgatacccacttttgtgtcccggtttggctcttcccatttctttctccccagagagagcctgtctctttcatctgtggcaggtgcatcctgctgacacttttacttggtgattgtttgtggggtgaaagggcttggacacagggggatgttctccaaccttctgaccaagcatccttcttagctatgggtggtgagaatggctctgaagcatggtcttccaagcgttcctgttccttcccttccccaagtcagagtgtctctttctagccacagtggtcttccatcagtgtcctcagcttctgacccactgtccttactccacagactcaggatttcattcctcaggaaagagacgggaggtgtttctgggtagagtctccttagtgtcctctgtttccttctgttctagttgattctaccagtgcctgaaggacacaagatttaataaatgtctcccacatatcgtgaagagggattcagcattgaacggagctactgttcttcctccccagtcaacatcacaggacagcaggtggctgagttgtctggggatttctccaattctgtaggaaaagcccgcaagtgccaggagtttcacactctcacagcattagcacacacatcctcaacaactcatgaaacatttccaggttagctttttcctatcttcaataccatacaatgagtggcacctgccccaggtactctaataaatggacctagttttctctgcaggctccccattttctcagatttcaggggtttttttctctgcaacatcaactcagatatgttgaagggttcattttttgtagttcttcaagtttcttgttaatgaggtcagaagaagatcattttctcatttttttttttacattcccgtgcttagtatctgctttctaaataaaattcggaaactaagacaaaatatcaaatatccactatttggtgcattgttaaactatttgagaaatattcatgtactgaaatacaatgaacaattgaaatcaaggcatgcctcagtcacataagaatgtgaggacattatcaaataattgtgctgagtgaaggaagctaaagaattcacagtaaatctcctgtgatttcttttgtataaattgtagaaaatgcaactattctaaattaacatggagaagatctgaatttttctgagaaaagtgtggtgaggtaacaagatggtgaaataaaattacagagaagtgagagaaaaaaatttggaggttaatttaattgctaatagcacgattgaagtgctgattcaaaggctgcacacatataccaacattttccatatcgtacactataaatttgaattcactattgattgaatttttgaataaagcagtaacaaaaatgagtatattggctgaggaagagcaagaaagagatgaatattgacacttgaataatcacggactcctgaaaatacacacatgtgaacactgattgcatatttcaggtaaatactagaaaaagcaaagtcacataaagtcgttatgacaggtgggataccctgcaaatcacactaggcatgtcccacactgccctggagctgtctcaggggagcagtctcctccagtgtttagaggcacaggcacggataatagggctgacgctgtccagatgtgtgatattggacacattgcacaactgctctgttatgtatgtaattcatcttctctaaaaatgtaacattgacacttgcactgaatatattctgcaaatatgtaaacattaaataagatgatgactgctaattgatcatcaagtcacaatcacataatctgaagttatattttcctgagagataggattacctccagtgttttccgggaccctctcatctgctctgggcactgccctctcctccagcgtcccactagagcttgctatatagtaggagacatgcaaatagggccctccctctgctgataaaaaccagccgagcccagaccctgcagctctgggagaagagccccagccccagaattcccaggagtttccattcggtgatcagcactgaacacagaggactcaccatggagtttgggctgagctgggttttccttgttgctattataaaaggtgatttatggagaactagagacattgagtggacgtgagtgagataagcagtgaatatatgtggcagtttctgactaggttgtctctgtgtttgcaggtgtccagtgtcaggtgcagctggtggagtctgggggaggcttggtcaagcctggagggtccctgagactctcctgtgcagcctctggattcaccttcagtgactactacatgagctggatccgccaggctccagggaaggggctggagtgggtttcatacattagtagtagtggtagtaccatatactacgcagactctgtgaagggccgattcaccatctccagggacaacgccaagaactcactgtatctgcaaatgaacagcctgagagccgaggacacggccgtgtattactgtgcgagagacacagtgaggggaagtcagtgtgagcccagacacaaacctccctgcaggggtcccttgggaccaccagggggcgcccgggacactgagcacggggctgtctccagggcaggtgcaggtgctgctgagggctggcttcctgtcgcggtctggggcggcctcgtcgtcaaatttccccaggaacttctccagatttacaattctgtactaacatttgatgtctctaagtggaaaacgtttttgtcctttttgtttctttgtttttgtaacaagaggaaacatcctcagctccacagaagccagggtgtcactttggggacagaaataatcctttcatggtcaccaggataagagtcctgaggaatcccagggaaacctggagagtgttttccagttagactcagggcagagacctccatgggaatctctgattagaacaggccttgagctctgacgggagccaagagagaggctcgcccagggtcagagtccttaaaacctgatggttttcacagctatcccccctcgtcttgtaaactcagactgattcagttgaccctctttctgctaatccatttccttctctgtaggtttgattctcacagttcgctttcttcttctcttccctgaaaacagacgatgtgttttctgtagtcaaaatcccagggctcaggtctgcaggacctgggtaggctacggggactttctcactcaccattgtctggacactcttgtcttctgtgcatggaggcatttggaaaatgaagtggacattagccatgaagggaataatactagttttctccaataggatattgatgtagagctgatcttgtgcttctcacactgtctcagagtttggactttcacctgtgactttgagaagagctggggatgggcactccattgtgctgtgagctctgggtaacgataattgtagaatctgcctaggcagtctaaggtcaatactactggtcatcaggaaagacagctggaattcctgggaagatctgcatctgccgtccaccatggagtcccatcgtcttctgttatgctctctttgaatcagtcccacctagattatctagaacactcttcctgacttaggaaaaataatggcaggctccactaacacctgtgttatgccatgggagcaacacctaagctagtgtgtgaatgagtagatgagactgtggtctagtcaaggtgacaggtaaaattgattgttgccattatgatattttattttatatttggcaatatagtcatgctcctattataaatattttttgagacggagtcttgctctgttgccagcctggagagtgcagcagcacgatctcggctcactgcaacctcttccacctcccaggttcaagcagttctcctgcctcagcctcccgagaaactgggattacaggtgcacgccaccatgcctggctaatttttgtatttttagtatcgacagggtttcaccatgtgggccagtgtggtctcgatttcctgacctcgtgatctgcacacctcggcctcccaaagtgctgggattacaggcatgagccaccacacctggcctagttttattaatgtctgtccataccagcaactacatacctatggggacattaatttacatctgcagacagatgtgtaaatacacaagcctatacatacatgtgtagccatttatatttaacattataataaaataattctaaaatattttctaaagaattaaacttaatgatgagctaaatataaattagagtaatctataattgatttcgatcattctctatagtttgcataaatggatgtctatttctaagccttaacatagtgtattcgtcattttaaaacagtcaagaaaaaattacaaatgttcttgtcacaaaaaaagataaggatttgatgatttgaggtaatatatatgtcaattaacttgattcaattattctgtattgcattcacaaaccataacatacctttgtgccccataaatatatacaaccaaaatttctcaattttcaatgaaattttaattatatatttttaaatctgatgcctctccttggattaagccacctcctcaggcttacagggctcttccattttctcaacatgctgttataccagatgagcacaaacacattaatttcattatgcttagctttaatttttcaaaacaacatgaaggtgataattttaccaatagacgtattgcaacctactatgcatgagaccctttctgtgcttcaaggtttcttctcaggactttatatgtattgcaaattttcatttttttctgatatggaatgctgatttctctttattacagattatcagtttatttttcaaatttatctcttaaaattaattttttcaaagtcccactcaaaccagggtattattagaactttgaagtgtaatagttggaccaactttgagaatacattcaatttagttcacgtgctctcaagtatcttttcttctttaaaagttgttgtcagttgtaatatcacacaaaatattagtaatttatactaatgacacaggttaaaatattgtataaataatttaattacatttgattggaaaaaaggaatatatgttcctcatatcttgacttttttttcttctctatgagatgcatgtttattaattattaagtttaagatgttacccttgtctttttgatttctgggatttaattttagtacatatacttgaatgcattgtattaattcatataataatgttcatattttggatagggttttaatattaattttgttattactgaattttaaactattctacactttttcattttttgtttttatgcgataaaatttacatataagaaaatatgcatagatctggaatgtatcactagagagtttctggcaaatgtgaatacccttgtccccagcacctaaggtagctgaagagcaagtccatccccacatcgcgggtctttccctgtgcctgcggtcaactcctgcatggggaaatgttttgatttctcacactacagatccatttttttccgttttgaactttatataaatggaatcaaacattatagaccttttttttgaaaggggcttcgatatttttgagattaattcatgctatttaatgtataaaattagatcaacatattgtcatttattcaattcatggactgactctgatatgaaacctcaaagttttcatgtatatatggagacagggagaggaaggagaaagattttatatctgagtcagtccattaagtaaataaatgagaatattttgatttattttcctgttgatgtactttaaatttgtttccattttatgaatattataggcaaagccgttacaaatatattagtgtaggttttcctatattgtctcatttttgttgagaaaatatgaagtatatatttctttttttatttttgattactatttatttatattttatattttactttaagttctgggatacatgtgctgaacatgcaggcttcttacgtaagtatgcatgtgccgtggcggtttgctgcacctatcaacctgtcatctaggtttgaagcacctcatgcattaggtatttgtcctaatgctctccctcccctttcctaatgcttttcctcccctgacacatcccagtgtgtgatgttcccctccttgtgtccatgtgttctcattgttcaactcccacttatgagtgagaacatgtggtgtttggttttctgttcctgtgttagtttgccgaggatgatgatttccagcttcatccatgtccctgcaaaggacatggaaatcattcttttttatggctgcatagtagttcatggtgtacatatgccacattttttcatacagtctatcattgatggacatttgagttggttccatgtctttgctattgtaaatagtgctgcaataaacatacatgtgcatatgtctttatagtagaatgatttataatcctttgggtatatagccggtaacaggactgctgggtcaaatggtgtttctcgttctagatccttgaggaatttccacactgtcttccacaatggttgaactgatttacactccccctcaacagtgtaaaagtgttcctatttctccacattctcaccagcatctgttgtttccagactttttaatgatcaacactctaactggcatgagatggtgtctcattgtgattttcatttgcatttctctaatgaccagtgataatgagctttttttcatatgtttgttagctgcataaatgtctttttttgagaagtgtctgttcatgtccttcgctcactttttgatggggttgttttttttttgtaaatttgtttaagttccttgtagattctggatattagacctttgtcagatggatagattgcaaaaattttctcccattctgtaggttgcctgttcattctgatgatagtttcttttgctgagcagaagctctttggtttaattagatcccatttgtcagttttggcttttgtcgtaattgctttggtgttttagtcatgaagcctttgcccatgcctatgtcctgaatgatactgcctatgttttcttctagggtttttgtggttttagattttacatttaagtctttaatgcatctagagttaatttttgtataaggtataaggaagggatccagtttcagttttctccatatggctacccagttttcccagcaccatttattaaatagggatcatttccccatcgcttgtttttgtcaggtttgttgaagatcagatggttgtagatgtgtggtgttatttctgaggcctctgctctgttccattggtctatataactgttttggcaccactaccatgctgtttttgttactgtagccttatagtataatttgaagtcaggtagcatgatgccttcagctttgttctttttgcttaggactatcttggctatacaggctgtttttagttccatatgaagtttaaggtagttttttctggctctgtgaagaaagtcaatggtagcttgatgggaatagcattgattgtataaattactttgggcactatggtcattttcacaatattgattcttcctatccatgagcatggtatttatttattataaaagtaactttaattttttcagttttaatgaggaacaattgaaatatttttaaatgtatatgtttaaggtgcaccacttcatgttttgatattgtgttagtccattctcacactgctataaagaaatgcctgagactgagtaatgtgaaacaaaaaaatagatgtttaattggctcatttttctgcagactgtacaggaagtgtagtggcttctccttctggtgagactcaggaaagttagaatcatagcagaagacaaatagtagtagacacatcacatggccagagcaggggccacaggaagagagggaggtctacacagttagacaaccagatcttatgataactcacacaatattatgagaacagcgccaagagtcagtgctaaaccattcatgaaagacccaccccatgacccaagcatctcccactgggtcccagcttcaggattgaggattataatacaacacgagattcaggccaggacgagttgcaaactgtatcagatacacattgtaaaatgctcatcatgatcaaggtaatttgtgtgcctatcatcccacatacattttttttttaaatggagtgtgtgtgtgtgtgtgtgtgtgtgtgtgtgtgtgatgagaatatctaagatctaccctttcagcaaaaatcacttttacaacacagtattaaatacaggaacattgctgtagattagatctccagaactcattcaacctgcacacctgaaattctgtaccctttaaacatcacccaatttccctctcctcccacatcctgggacccattattttactttctgctttcaagagcttgggtgttttagataccacatgtaaatgagataatgcagcatttgtctttctgcatctggcttattccacttagcatcatgtcctccaggcccatccgtgttgttgcaaatgtcagaatttccttcttttcaaagcctaataaaattcagttttatgtgtacacattttctttatacattcatcagtctgtggtcattaaattattttacaaatctacactattataaataaccttgcaatcagcatgtgtttaacataataattttacttatttgaatacataacaagaagtgggatcaccagatgatatgatagctttatttttcaatttattgagtaaccaatcctaccacaccctaaaaggattctcttttcaccacattcttgccaatatgtgttatatgtcttgctgatgatagccattttaagcagagtgaggtgataactcatcatgattttgatttgaattcctctgataattagtaatgttgagaaccctttgaggctctgtttttcatgtgtgtgttttctgaagaaaaacctatccagtttttgccctttttatcagatcatttgttatttgctattgagttgcatgagttatttatacttttggatagaacttatgtcaggtatataattgcacatagtttttttcctgtgcttttttctattaaattcaaagaaatcatttctgaatcaatgacaggaagtttttttccatgtgttctatgagtttgtggcttcaggttatgttcatttttagtttatttttgaatacggtgttagagaaggtctaattttatttcttttgcatatggatgttaagcttttacatcatatattgaggagactgtccatccttcactgtgtgttcttgggatacaaaatcaggaagatgcataatttaaaaagaaaacatcagatgaatattcctggtgaatatagaccgaaaagttctcaacaaaatactagcaaatagaatccagaagcactttaaaatgtaatacctcatgatcaagtaggctttacccctggaaggcaaggttcattcaacatccacaattcagtaactgtgattcaccatgtaagcagaataaaagcaaaaaccatatgattatctcaatagatgctgagaaagcttttgataggatccaacatccgctcataataaaagccctcaacagactaggcatcaaaaaaacttacctcgaaataataagagccatctatgaccaatccacagtcaacattatactgagtgagcaaaagctcaaaaccctttagaagtgaaagaagaccaagatgccctctcaccactgctattgaacatagtactagaaaccctagtcagagcaaccaagcaatatcaaaataaaaggcagctgatatggtttgtacttgtgtccccactcaaattaaatgtcaaattgtaatacgcagtgttgagggtggggcctgatgaaaggtggttagatcatggggatgagtctctctctcgtgctgatcccatgatagagccctcaggagatctggtttcaaagtacgtggcacctccctcgtctttcttcctcctgctccagccaggtaggacatgatgcttccctttctgtactgattgtcaggatcctgaggcctccccagccatgcttcctgtatagcctgaagaaccatgaaacaattaaaaatctttataaattacacagtctcaggtgtttctttatagtttgcgaatggactaatacagaatccaaataggaaaagaagaactcaatgtatctctccaaactgatgatataattctatacctagaaaattctaaagaccctgccaaaataattctagaatagataaacaattttggtaaagtgttgggatacaaaatcaatgtacaaaaatcactagcatttctataccccaactatgtccaagctgagactgaaatcaagaacacaatcctatcccacttacaatattcacacacacaaaatatgaaatgcctggaaatacaggtaacaaacaaggtgaaggatctctgcaaggagaactacaaaatacagcagaaataaataaataaatcgtacatgacacatgactcatctgacaaagggctaatatccagaatctacaatgaacttaaacaaatttacaagaaaaacaaacaaccccatcaaaaagcgggcaaaggatatgaatagacacttctcaaaagaagacatttatggagccaacagacacatgaaaaaatgctcatcatcactggccatcagaggaatgcaaatcaaaaccacaatgagataccatctcacaccagctagaatggcgatcattaaaaagtcagggaacaacaggcgctggaggggatgtggagaaataggaacacttttacactgctggtgggactgtaaactagttcaaccattgtggaagacagtgtggcgatcctcaaggatctagaactagaaataccatttgacccagcagtcccattacttgctatatacccaaaggattataaatcatgctgctataaagacacatgcacacttatgtttattgtgtcactattgacaatagcaaagacttggagccagcccaaatgtccaccagtgatagactggattaagaaaatgtggcacatatacaccatggaatactatgcagccataaaaaaggatgagttcatgtcctttgtagggacatggatgaaaatggaaaccatcattctgtgcaaactatcacaaggacagaaaaccaaacactgcatgttctcattcataggtgggaactgaacagtgagaacatttggactcaaggtggggaacatcacacaccggggcccgtcatggggtcgtgggagtggggagggatagcattaggagatatacctaatgtaatgttaatgggtgcagcacaccaacatagcacatgtatacatatgtagcaaacctgcacattgtgcacatggaccctagaacttaaagtattatttaaaaagaaagaaaaaaactattaatttttctgaaccatgaacatggaatatttcagatatattttcaatttgtgtgtgttcactttattttttattatcaatcatttctggttttcttttagaaatctttcacttatttggtaatatgaaatataatttttagctattataaacaaaatgctttattgattttttgctgtttgcatttagcaatgccaccaatttttgtatgtaggtgttgtattctgcaaatttacagaattttttatcaattataacagtttttccagcaccatttattaaatagggaatcgtttccccatttcttgtttttgtcaggtttgtcaaagatcagatggtcgtagatatgcagcattatttctgagggctctgttctgttccattggtctatatctctgttttggtaccagtaccatgctgttttggttactgtagccttgtagcatagcttgaagtcaggtagcgtgatgcctccatctttgttgttttggcttaggattgagttggcaatgcaggctcttttttgttccatatgaactttaaagtagttttttccaattctgtgaagaaagtcattgatggggatggcatcgaatctataaattaccttgggcagtatggccattttcacgatattgattcttgctacccatgagcatggaatgttcttccatttctttgtgtcctcttttatttcattgagcagtggtttgtagttctccttgaagaggtccttcacatcccttgtaagttggattcctaggtgttttattctctttgaagcaattgtgaatgggagttcactcatgatttggctctctgtttgtctgttattggtgtataagaatgctagtgatttttgcacactgattttgtaccctgagacttcactgatgttgcctattagcttagggagatttggggctgagacaatggggttttctagatatacaatcatgtcatctgcaaacagggacaatttgacttcctcttttcctaatcgaataccctttatttccttctcctgcctgattgccctggccagaatatgtagaaagctgaaactggatcccttccttgcaccttatacaaaaattaattcaagatggattaaagacttaaatgttagatctaaaaccataaaaaccctagaagaaaacctaagcaataccattcaggacataggcatgggcaaggacttcatgtctaaaacagcaaaagcaatggcaacaaaagccaaaattgacaaatgggatctaattaagctaaagagcttctgcacagcaaaagaaactatcatcagagtgaacaggcaaccaacagaatgggagaaaacttttgcgatctactcatctgacaaagggctaatatccagaatctacaatgaactcaaacaaatttacaagaaaaaaacaaacaaccccatcaaaaagtgggtgaaggatatgaacagacacttctcaaaagaagacatttatgcagccaacagacacatgaaaaaatgctcatcatcactggccatcagagaaatgcaaatcaaaaccacaatgagataccatctcacaccagttgggatggcgatcattaaaaagtcagggaacaacaggcgctggagaggatatggagaaataggaacacttttacactgttggtgggactgtaaactagttcaaccattgtggaagacagtgtggcgatcctcaaggatctagaactagaaataccatttgacccagcagtcccattacttgctatatacccaaaggattataaatcatgctgctataaagacacatgcacacttatgtttattgtgtcactattgacaatagcaaagacttggagccaacccaaatgtccaccagtgatagactggattaagaaaatgtggcacatatacaccatggaatactatgcagccataaaaaaggatgagttcatgtcctttgtggggacatggatgaaaatggaaaccatcattctgtgcaaactatcacaaggacagaaaaccaaacactgcatgttctcattcataggtgggaactgaacaatgagaacatttggtctcaaggtggggaacatcacacaccggggcccgtcatggggtcgtgggagtggggagggatagcattaggagatatacctaatggtaaatgacaagttaataggtgcagcacaccaacgtggcacacgtatacatatgtaactaacctgcacattgtgcacatgtaccctaaaacttaaagtataataaaaaaaagaaaaaagagacccaattgttgacaaagttatgaaaaagatagtttttaaggagtctttaagtaatattgtattttctgcaaacagacaatttgatttcccctattccaaatttcaggacatttcttcttttttcttgtcaaattgttctggctagaattacagtaccatgtagaagtggtggaaaagagcatttttgtcttgttcaacatcttagagaaaaggctttcagtttttccagccttggtataatgcaagctgtgggtttcacatatctggactttattattttgagatatgtttcttgtataccaagtttgttgagaatttctataaggaatggaggttgaatttttttctatgactttcttaaagcaattaatcataaaataataataagcaggtcaatacaagatccataaattagtggaagctagttatttgcactgctgccatagagtaggatcactacacaactcatggtgttgatgggaaactataattctgcaataattaaagactagtgatttacactgggctctattgagagatttggttgtcaactacagaaatcgagatgaaggggcactgagaaacatttcgcttcatatcatctcaacttctaatatcaatttttagtactaatacagtcctattttctcagtatactgtctcacaggttatagtatatgtcttagaaaattaagggttgtttcattctaataattaactcagaaaaattcatttcctattatggatgacaagtgtaaattcatatcttaataattacccacactccaaaacactactacaggcaaaggcaagagaaaggcaggtatagatgagattctctgaggtcagttatgtaaatacccaaggactattgtctatgaccttgaatgtcactttcttcccttccatgagctacatccaggatattctgtgaatctgagagcgttgagcatgtttaattattttatctcactgccccttagtcttgctttctccagttgacaaccaaatctctcaacaataggcccagcgtaaatcaccagacttcaattattgtagaactatggtttcccaacaacattatgagttacaaaatgatactactttatggcagcagtgaaaatgatgaacttccactaacttatgaatctctgaatggctagcatggaggtgtgtatgtatcagcgcactgttctagaaatgttccgtttctgtccattattttatgtagtaatgaggacaacgtgaactaaagggagtatccatggccttataagcacagagaccacatccagtgcaggtgcagagcaaggctgcaacagtcagcaagttgctctctgaagagtcttccaattcccttgcccaaagcatctgctcattcatgggctgagaaaagggaagtcatgcatgcagtctactctctctacagagctgacaggggacacggacaacatcgattattcatggaattttcccataggaatgcagctgtgtgcacacacacataatacatttttaaatgttttttttatttatcctctccaattttaaaaaagtcatcaccttttctcctaatcaaagaggattttgaccagaatgcttggtgggagccccctgctctcccagatgcccacccttatttctcttgaagtgaagaacggcagctctcttgatttctactctcatcctctaggactaaaaccagaaggttccacgccccctgggtgaacatccaagaagaccctgtctgtagcagcaggagcctcaagccttgactgagagctatggtcctgaaatgagacagtgtcccccatggagagcacacgtggacgcccacaactgagggctcactgctcttcaccacagatgcgctcccttactgagtcctgagacctgagtgcaccccatagggtagggctcagaagaggggatgcaaatctccaccagctccacccttctctgtgttgaaaagccgagcatggggacctagttcagtgactcctgtgccccaccacatggagctttactccacgcttctcctgctgactgtcccttcctgtgagttcagtggtcagggaatccttcaggggtgaaacacctgttcttttctttgtgggcttcatcttcttatgctttctccacaggggtcttatcccaggtcaccttgaaggagtctggtcctgcactggtgaaacccacacagaccctcatgctgacctgcaccttctctgggttctcactcagcacttctggaatgggtgtgggttagatctgtcagccctcagcaaaggccctggagtggcttgcacacatttattagaatgataataaatactacagcccatctctgaagagtaggctcattatctccaaggacacctccaagaatgaagtggttctaacagtgatcaacatggacattgtggacacagccacacattactgtgcaaggagaccacagagacagagcccagggtgcctcttgtacaagaacccaggctgcttctcagtggcgctccctccccacctctgcagaacaggaaagtgtggctgagatgccatttcctgtcagggtctgggtgtcttatcctatctgactcagagccttgtcttcctccctcttctttagtaataaatggcatgacccctgttagtggttcatgcaagcagaggctgtatcctgtttgacaaagattcagcatgaaaggttcctgttacttgagccagatgcatcactgatatgtggccaccagtttcttagactcataccactttaagggaccaaatacaaatgtccatagcatatgccattcttaaactgcagaaatgatgtcaaagaagaatgtggagataagagagcaggaggaattatgaaaatctggatagcatcttctcttctagggtggaaggtatgctagtaaagtaatttaatgaaacaatcagacagatgcaatatgtcctcatcatggagtgtctcacatgggcagtgcacaaataaatttctaaaaattccataaggtagatgtgatggatgaggcttatttccacacagggagcccacaaatatccagagaagtaaaaaatctgacacttggaaagaaaattgcctcatcttgacatcagaaacccatttcaacatgtccgaggggcaatgtggaaaagaaatggaaacttcaaaaacacatttcttatgaaatgtctagctcatgtttgaacataaaaacagaattgtccatgattttagaaaaaccaacccatgacagcgagtcactacactcagaaacaccactgagtcaacagacttcagtctgtgagcaggtcagtactgaggccccaggtgaatcaaggctctcacgtacattgtacagaacccagaattgagccacacaatctataaccaagtcttctttgacaaactttacaaaaattaacaaaaaaatacaccagagaaattcaatatatgaaattcaatatacccattcaatatatggtgctggggaaattggttagccacgtgcagaagaacaaaactagacccccaccctcaacacatatatactcaacacaaaatgaattaaagacttacatataagacctcaaactataaatctactcaaacaaaacaccaggacaactcttctgggctttggcctaggtaaagaatttatgactaagaccccaaaagcaaatccaagaaaaaaatagacaaatgggacttaattaacctaaagcatttttcacagcaccggagtgaacagacaagttgcagagcgaaagaaaatttttccacaccacacctgtgacagggaactaatatgaagaatttgcaaggaactcaaactactctacaacaacaacagcaacaagaaccaaataactccgttaaaattagcagaggacatgagtagacattttcaaaagaacacataaaaatggataataaatatataaactacgctcaacatcactcatcatcagggaaatgcaaattaaaaccacaataagatatcatcttccaccagtcacaatgactattactaaaaactcaaaaatatcagatgttggtgaagatggaaaggaaagggaactcttagacactgttgatgaggatgtggatgaggacaacttctatggaaaatggtatggagatttcccaaaaaactagaaatagaactcccctttgatccagcaatcccactactgggtttactacccaaaggaaaataattttttatttccaaaagatatccacacttctatgtttatcacaaaactattatcaacagcacatatgtcaacctgagtgtccaccaacagatgattttataaaagaatatagcatatatgcacaattcaatactagtcagccacaataaggaatgaaactgtcttttgcagcaatatgcatagaactggaagacaacataattagtgacctaactcacaaacagagagtcacatgtcacatgttattatttataagtggaaggtaacaacgtgtccacaaggatatggagagagaaatgatggacaccagagacttagaaggatgggaggtggaaggtgggagcatgaggagacattacctagtgggtacaatgtacattatttgggtgatagtacactaaaagccaagaccactatggaatatagccatgtccaaaagtggcattcgtagtccttaagtttatacaagtaaatgtacacacaaataaaattaaaaatataaaataattaacagttgaccaatgatcttaaaagttgatttaaaatataatcaataaatgaaatgaatatcagttgaacctcattaaatttgaaaacgttttatactcaaatgactataagaaaatgaatgtcaagtttcagatgagaaactgtttgcaaatcattagccaccaacataagtataataagaaccctcagaactcaactgtgaaaaaaagaaacaacccatggatagaataggcaaaggtttgtgcagacatttcatcaaataagatgtacagatgacacataggcatataaatgggctcgcaacaggattttccattcgaaaaattcaaatcaagccgacagtgagacactactatacaatttttagaaattaagaagaaatacagataataccaatgctggtgagcatatcagggtccaagactctaaaacgttgcaaacaggaatgcaaaatgaaactgctactcaggaaaataatttatagttttttctaaaatcaaacattttcttaatatatgacctaaatatcccactcctgaatatttgtgtcagagaaatacaatcttagattcacaacaaacttccatttaaatgttcaatatattgtgctcacgtgtgtgtgtgcacgatagaaacaaaaagtaacatgaatgtctcaaaatttgaataggtaaaaagtaggaagtgtctattaattgaataccatcagcaataaaaaataacaaaatgactgatacacaaaccattacaggtgaactccagacatgatgctaagtgagagaagccagtctcaatgatcaaagggacacatctgtaagcaccacggtcatcctcaggtgtcagtggtttgggctgggctctctgtctctttcctgaccagacccagatgttgagctccgccacttgcagatggaaaattctactattttcaacaatgcactgaggtttgaactgcttcacagactgaacgaaacaaacacgggctcctttgaacagtgtgcagcatttgttccaaccacaagagaatgtctcccagctctgccccttctcagttttccctgcaagccagcagccctgcagtttagcctgcatctcccatgcatgcacccatctccttccaagggccttactccacaacctccacttattttgagtgcactgactggctttgaacttttccacattctgttgttattgaagttaggatgtttagagccatattaaggatcatattttatgactgaattccagtgccccctctctcctgggacagagcacgtaaccaacattctgcatgtggagacaaagatgagcttttttcttcctcagcctaggagatgagcgctcagtggagggttggatagaagcttcccaccttctcagcactccagttctggtggggagaacctctgccataggagcagagctagaaaccagggaccgaatgttcccagtgacactggacccagggtagagcctccatccacgagtggggctccatggaagaagcgagtctctggctctcagtagcttttgtccagaactgagccttaggatcgtgtactgtgggcagagtcagagggccaatgtcctggctcctggggaacagtttcctctgaagggagctgggtagaaggtgtcctgtcttcttggctacatctgtttgcagtggagtttacatcatgctgagttgggatgtggaaggaaggaggagcatcttagatcaattatgatggctagacttactgaattttgtagattttcttgaataaatgtttcttcacttgctgtatgctgtgagagcctttccaaaccctgtattttttcaaaataattttcactggtctcatgagggcatggattcattgagcccctcatgctatcaaagagaaatagaactttttttgttcactttttagagaacatccatgggttataaaacaatgggttgacttctcttccaaaactttacagataccgtcaattttcctcttgcttgtaaggttttatccagaagaatgctgtcatcattttttctgcttttttggaaggaatgccccttctactcacctcaaattgcctgcatgtatttctatttttctttggttttcagcagttttaataagatttagctaaatgtgtgtggggggagcagggagtgtcattctgctgttctgtgttctctgagatgcatggattcacggtttactctgtctccattttggggaacacaattagaaaaaatgtcagtgtgagcccagaaacaagcctccctgaagtgggcagaggaccacctgggggcgctcaggacccactgagcacaagagccagccccagggcaggtgcagacgggggttaagatctggtttcccgtcagccctgtggcttcctctccataaaacagttccctcgggggcacgtctctggattccttatcttgttcttactgtgaagtctctgaagaataaacatttgttgtaacaagagaaaaattttctcccatgcaccaaaggcagagtcacctacagtcaattagtcctgtttctcaatgttaataaactatcaatgtttctgaaggtacattgtacagaacccagaattcagccacacaatgtatagccaagtgatattgacaaacttaacaaaatatacaccagggaaaggacgtcccattcaataaatggtacttgggaaaatggatagaaacatgcagaagaacaaaactagatccccaccctcaacacattagtcaggtctctaaaatgcaggagtacatatctaaaatttattattttattgtgcatttttacgtgttccagaaggtgggagaaatttctttctgtgaagagcatcccaaagtcaggcactcctctagaacacgtgtttaatccttgtctttggcttattgatgagctctgttggctgcaataacttctgccatccgggctgactttgcatcatgtagaggagcaaattctgaatgaaagtttgcactactcaattgagtgcataacctacagttttgttactgatgtatgattcatcagagatgatatcagatcaaggatttcaatgagaatctaatctaaaagatgtaaacaaattttcctaatttagataaaattactgtgagcacactgctagtattcagccatgtctcctatcacattgaatctacactaagtttgacctaaaagctagcacttgttctcatgttccaatatgttatttttattttaatgtattcagattactatgtgttgctattttacccaaagtgaaggaaagcaattttaactgactgaaaatgagaaaaagcacaacctaatgaaatggaagtcaggacatgagtgtctccagccttgtctatttcaaaaattcacgtacgcagggggatttctttcctcaattttacacagagaaacttccaaaatgtttgtttcctctcccatggactctatcatcagtttctatgtcagtttgcttagaattttggcctccagctccaaccaatttggtgcaaaaacatgatttcattcttttttatagctgcagagtattgcactgtgtataagtaccatgttttctttatgcagtctataactgatgggcgtctaggttgattccctgtattaggtaatgtgaattgcacagagataaacacatgagtggatgtgtctttgtgttacaatgattggttttctcttgggcatatacccagtaatgagattgctgaggggaatagtagctctgttttaagttctttgagaaatctctagactgactgaattgttttctctgtgaatggtgataattatgtcaatatttgtcaaattttgaatgtattgtttgaagattgttatttgtcaatattacctcattaaaactattaaaaatggaagtgtataatttggtagaaaaggattaaaagaaagataaaaataatacaagaaaagtcacagactcctgaatccacatgtgaattagcactcagtttttctatattatttataaaaacactaagatacagccaaataatatcatgatatccttataagaagagtgtttcgtaaacctcactgggaatttctagctctgtcctagagttaatttagggagcagtcggatccagtcctgagcaacacaggccagacactgagacttaccacatcttaccagatgtgagctcttagacacgtcacatggcctctccatgcttgggggtttaccttcacatctgtaaatgaaggaaacattgactgccacagaacatacttcatgtgcatctatacagtagaaatgctaataagaattaattgtttatgaagtgtaatcactctgggacacagcccactcagaggcatcccttccagaacccgctatatagtaggagacatgcaaatagggccctccctctgctgatgaaaaccagcccagccctgaccctgcagctctgggagaggagccccagccctgagattcccaggtgtttccattcagtgatcagcactgaacacagaggactcaccatggagttgggactgagctggattttccttttggctattttaaaaggtgattcatggagaaatagagagattgagtgtgagtggacatgagtggatttgtgtggcagtttctgaccttggtgtctctgtgtttgcaggtgtccagtgtgaagtgcagctggtggagtctgggggaggcttggtacagcctggcaggtccctgagactctcctgtgcagcctctggattcacctttgatgattatgccatgcactgggtccggcaagctccagggaagggcctggagtgggtctcaggtattagttggaatagtggtagcataggctatgcggactctgtgaagggccgattcaccatctccagagacaacgccaagaactccctgtatctgcaaatgaacagtctgagagctgaggacacggccttgtattactgtgcaaaagatacacagtgaggggaagtcagcgagagcccagacaaaaacctcctgcaggaagacaggaggggcctgggctgcagagggcactcaagacacactgaaaacacggttaacactgggacaagttgctcaggaaggttaagggctggtttcctttcagagtctttgctgtttctgtatctaacagtttccccaggaaccctgtctagatttgcgatcttgatctgcttaaactgtctctgtgtcatttttcttacctgtgactttaggggagctgatcgtggacactccagtgtgtggagatttcctggtgacagcaattgtgtgttctgtctaagcatgtctagggccggtcatcaggaaggacaggaaggacaggctggaattcttggaaacagctgcacctgccatccaccagggaactttattgtcttctgttctgctaaaattaaatcaggcacaccaagtttaactagcactatcttcctagcttaagaaaattgatggcaggtttcaataacacctatattaaaccttcagagcaacacctacattagtgtctgatttgataattgagactatgttctagccaagcagacacataaaactggtgattgccatgcttagttcatatttcatatttatcaatagaatctggctggtgttataaacagatttgccaacacatgtgtgttagtgtttgtcttcggagaggcacattctatgactggattaagtttgtgtacaggttcctaaggaacctgttcatgcttttgagaggaaatgcagagggggtggaaggcggctggggaagctgaaggtatacgagggaagtcagtccctgagtgaaggagagagggaggagaactgggtagaactttcctaaacttctgtgctggtctaggaaggtccagcaagatcactgagtcagattcgtgtcaaagtttcccatcggggacccccgtgactcccagcagtggctctgctcagatcagcacagagctcgttcttctcctgagagtggagcagaggatgtggctccagcaccagccatggcatggacgtcagagagcagccccaggcacctgagtcgggtgcattgtgccccctgcaggtggacggagggaggtgctgactcagggcccacacgctgtgggttctatacagaacacacacttttacttcatttctgtggatgacatagaaacaaacatgcagtctattaacagcggtgattcctacatttgccccaattgctttattccttgattccgcagaatatcctgacgcagaattgtctttctctcgtggaattgcgacgtgtttaggacgtgtgttccccactttcagtgttctgctccatgaacagagatcctgagtagagtacagctgaccctccttccacactgttcctctcctccccacaggaagagcagataattacctgaggctgaatctgaggtgggatctgtcctctgaacctcagagcctgcagagacccccggctgcagattcatggagtcaggtgtttgtacatgtgggaaacttgagctgttcttttgtcagtgaacactccttagaactaattgtgggttcagaattaggacacccattgatctatcacacctcagctcattctgccactcagaatctccagaaattcaggaaatggttcaatttacatgtttgtgacacattgttctcatttcatttagttgtgagtttggtcagcaaaagtgctaccatttatgtgtcccaacctgatgaagctaacttgcttcaccagatgttgggagctcctgaattttatcctaagcccctctctctccacttcatgtgaaattcggtttgacctggaattctggtgtgttgatttagccagatttccccatactgagtgtctgattttcctggatatctgatcagtttccttgtccttcaccataacttgggtgacatctgatcaccctgggctaacttcaacaaaaatcctggcaggttgccttaagcaggatttacctcactcctgatgtttcttcttgattttccatcctttgccccaaccctgctgcatgcctataaatccccacgttctcactctgtatttggagttctgctgaatctctccctcattgcaaaatcccactgccctggtccctacacctatcatgagggccctggataaagtcttccttactgtgctgtagaaagtgtctttgtatatacattttttctttaacaaatctgcctttagtatttcctaattgatcaaggaacctcaaacattgaatgaaagtgaggttttccattttactaacatatgtgtatctgtgaatttcaatttcaatgtgtggtgtccagaagtcctgagcaccaacagttgtgcttctctgtccaattatttgattctgaaacctgggagtcatcccaacacaggtaaatatgtgattttttttttttttttggtttttactgtttagtgactgacttatttcacttacactgaagcttcatgaacacaatgatgaaaagtagagagaggacttgtttgaaaatgccagatttatggtagactttaccacccacgtgtgtctggaggtcttcttaaggttccaagaacaggacatttttcccacaacaagacaaggatgagaacctctgagctgtgaggatggaggacaggcagggccatgtgtggacaaggacgggctgctgctatgtccagggtgttctctactagcaaccactccatctccttcctcactctgtggtatttgtcagatgggaaacatgcctagaatttatctttgacatctggatggaagcccaggcaagaggcatttgacagcttattcgtgagcctacttctttaaggaatgccagatcccttgctctccttcctagttcttaacccctttaactcccttcccctcctgcacccatccactgcctatttacagccacgtccccacacccttcactgtagcaccattttcttgggctcctgggaaacacaacagctttggtttaactcacagctcaggcacactcacgggtcctttcagaggctctcaacttccctcctacagtccctcagctcctcctggggtcctaacttggccatctctatcctctctgctgagcctggccatacacaatccatcccatctggatatgtgtatagcagtgggttaactcagcaggcatgaatagttcaaaccctccacgttcctaaaaaggtaaataactaaaaaataaaaacaaaagtaaacctttgttcatttatggctgtctgttacctcctgggatgagatctccgagtccatgaaatcttacacctgataaaagtgtctgcagatgtctgcagccttgggacatgctgtacgagtttaatcacagtgatttatagtgaacgcctgcttttgttttgctggggagggctgtggtctgagtattgtggtcagttacccaggtgttccatagtctatgattcattccccaaacacagccctggacaagaaaactcaggggcactcccctgggtgttgacacttcacacatgtcatcttacctcatagctggagcattacacatgtgcagaaggctccacagtgggaggacccctgagagcttgtgcctggattctcctgagcttcactctttgtgccttttttttccatgtattttcaattgtatcattttgctgtaataaactgttcctgtgaatacgagttttcatgagtcctgtgtttttactgagttttgagcctgagggtggcagatgcaacttctcaatgcagttgtatcagaagaaggatttcctagagagatcctaagtgacacatggctgaagtattgttcagaaaacataagtattcaggtgtggaatggcaaaatctgatacttgggtggcaacagaattacccggtctgagacagcagctgaactgaagtagatgtctggagataaatgcaatttagaaacgataactcatactcccaaagagctggctcaatcgatacataaggaaaaataaaatgataaaaaataacctaaatatgcaattactatttgtgagaacatccgggagagtgattgcagggaaagtggcctgcgccgacctcagattttggccaatgtcatttctggctgatgggctccagggcactacctaagggagcaattatgctgcaatgacagacagaagcttcgcaagctctctccacccagaaggtggttcaggtggtgaagtgcggggactggtgagccacaaaacactgaaatgagggaggaaagtgagaaagtgaaaggcttttgagctttttctttagcttaataatttttgttaattattaacaaaataattggacaatgactaatgtaaaagtggaccgtgttttgagtcccttagaacggaggagaatgcagcggtcaatgttgtgcccagagattactatagaacaatagtaggtggttgaacatgctccaaacacaaagcctcttgttgctgatgggacagctgccctcgtctactgcacaacagcttctccaaagtgtgtttaccctgagcattgagattgcctttctcttgtaagtgaaaaaatcggaaaactccaaataaaggaggagttgtaacgctctatgtgtaagaaattctaatgtggatttatgataactgggatatgcatccacttatctttttatctgtaaaaattcatgggtgaaagtgcaattttgttacatggatatattgttcagtgatgaagtctgggctttgaggagagtcatcatctggatggtgtatattgtacccagcaagtaatttctcatcccacacaccactcccaccatccaaaccttccaagtttccaatatttattatgccacactctatattcatgtgtgcacattatttagttcttacttatatatgacatgtggtattcaactttattcttctgagttatttaacttaagatagcagcctacagtttcatccatgatactgtaaaatacataatttcattttttattattgagtagtaattaaatgtgtgtatatatattcacaaatatatataatgtatttgtgagggtgtgtatgtgtgtatatatgtgcatatatacatatacaacatgttttctttatccaatcattcattaaaaacacttagtttggtaccgcatatgtgctattgtgaataaggcaacagcaaacataaatgcagcatctatcgaatataaaattcatttttctttgagtcgataccaagtagtggatttgccgaattaaatattagttccatttaataagagaacttaccaacatctgtttcttgtttagtttagtttttatttttgactttttaataatagttattctgactggtttaatatggcttctcgttttgacttcaaattgcatttctgtgatgattaatgacattgattgttttttcatatcctggttgatgatttttatggcctcttttgaaaaataaatgtctgatatttgctcactttttaatgtggctatttgtgctttttgtgttgctttagtttcttgtagattccaaatattagctctttgtcagatgtagtgtttaaaaatatttttcgtcattctgtaggttttctgttaactttgttgattatttattttgctgatcagatgttttgcttcttatttgtattaagtccaaataacctattttggtttagttgtgtttacttttaaggtcatagtcatgaattctttgcctagcacaatgttcagaaaaacacttcctaggatttcatttatgactttcagactctcaggcctcccagtcaagtcttttatccatattggtgtaatgtttgtatgtagtgagacatatgggtccagttttattcttctgcaaatagctgttcagtttttcctgcacaatttattgaacaaggtgacattttcccagggtatgctttttgtctggttggtcacagtcagttggctgcaggcacatgactgtatttctggaatgtctattctgttccaagtatctatggttctctggttgattgttacttgtgtataaaaatcctactggcttttgtatgcttttttatcctttattctaaaacttcactgaattaattcatcaattctaggagtacttctaaagaatattagtttttaagtacaaaatcatattgtcagcaaacacacacaaaaaactgacttcttcttttccaatttgggtgcctttatttctttctggtgtcttatttctctggctaggatttcaagttctatattgattaagagtggtgaaagtgggcatccttgacgtgttctgagtcttaggaggaatactttcaacatattgctactcagtataatgttgtatgtgagtttgtcatatatgatttttattaatttgaggtatgttttccttctattctaattttgttgagggttttttatcataaagaaatcctaaatgttatcaaatttttttttctggacctattgacatgattatatgttttttgtttatgtggtggatcacagttattgagacatgaacgttgaactatccttgcatccctgaaatgaaacttagcagattgtagcatattatctttttgatatgtagttggacttgattttcttgtgtcttgttgaggatttttccatctatagtcatcagtgatattgatctgtagtattcatttttgggtccttgcatggatgtggtatcaggctattagtggctttgtagaatgagttagggagaaaaaccctctcctcgtttttttggaaaaagtttcagtagaattactagcagatctttttgtatattggacagaattcaccttttaaaataatatgctttacggctttgatgttgagatttttttaaattactgcttcgatgtcactaatttttgttggtcctttcaggatttttatttcttcctatttcaatcttgggagattatatatttccagacatttatctattcaccctaaattttctagtttatgagcctggagatgttcatagtagactatgttgatcattatatttctatggcatcagttgtaatcttttcttttttgtttctcattctgcttatttaaattgtctgtctactttacttgcctaatctagctagtggtctgtaagttttgtttatcatctcaaaaacccaatgttttattgtattggttctttgtatttcttggttcttaactttatctagttctgctctggtctttgttatttgttttcttctgctgtgtgtttggtttgatgttgtttttctagttatttgatacgtaatgttaggttgttaatttgtgatctttctttttgatgtggtcatttaacattataatcttatcccttagcacagcttttgctgtaaaccagaggttttggtatgctgtttctctatttttattcatttcacaacatgttacaatctttttaaattttatcattgacccaaagttcattcagttgcaggttgttaaattttcattgtgtgtgtagtcttgaatattcttctagggtttgatttctggctttatattactgtggtctgagaagatatttcatttttaaaaagttattgagtcttttatttctggcatagtatataatccatgtttgaaaatattccttgctaatgggaataatgtatattctgcagtcattaggttaaatgttctgttaatgtctgttaggttcatttggtctagagtccaatttaagtctagtgtttctttgttgattttctgtcttaatgttttgcctagtattatcatttgggcattgaaatccatcacaattgtattgttacctgtgttcttccttaggtctaatagtatttgttttatgaacatgggttttctggtgcagagtgcatatatatttagaattgtcatttttaatcaatcattttatcattatataatgactttctttgtctttacttactggtgtttatttaaagtttttttatatgatatagatagtcttgcttgcttttggtttccaattgcatgaaatatattttttcaccctcttgatcttgaatctacgtatttttaccaattaagtgagtttcctgtcagcagcataaatttcaaaactcttttttattctttccactaatctatatattttaggtgaagaatttaactcatttatattcaaacttaatacagatatgtgaggtctggcttctgttgtcatgttaattattaactagtggctttgtagtcttaattgtgtaatagttttatgagtgaattttataattttgtgttgtttatgatggtgagtactgacctattgcttccatgtctaggtctcccttgagcatttcttgtaggtgcggtctggtgtaaataaatgtccttggcattttcttaccttagaaatactttatttctccttcatttatgaagcttagtttagaaggatacaaaattaatttctgacatagaattttttctttttttttctttaagtagtctgaaattgggagtccaatctcttctatcttataactttatgctgagaagtacactgtcagcatgatagaatttcagataaattattagacacttttctattgtgaattttaggatttttttcttcctatttactttagatagtctgaggactatagatcttggtaatgtctgtcttccagtgtcttctcatgtagttttctgaaccacttttatctgcatatgcaaatatctagcaagactagtgatgttttcctcaattacttcatcaaattggtcctctaaaactttttactaattttctccctcaggaatatccatgattattggctaagttgttttacataatcctatacttcccaatgattttgttcatttttttgttattttcatctgactgggttaatgcgaaatatctgtctcttaggtttgatgttctttcttctttttagtgtagcccattgtgaaagttttaaactattttttgtaattaaaattcaatgaagtctttactccctgaagctttatttttaaaatattaaagtcttaagtaaatcttgaattgttctgatttttttttttttttttttgacacggagtctcatactgtcacccaggctggagtgcagtggcgcgatcttggctcactgcaacctctgcctcccgggttcatgcaattctccttccttagcgtcccgagtagctgggactacaggcacacaccatcacacccagctaattttttgtatattgagtagagacagggtttcactatgttggccagactggtctccaactcctgacctcgtgatctccgctccttggcctcccgaagtgctgggattacaggcataagccaccacgcccggcctgagttattctgatttatttgtgttggttctcaaatttcttttggatttaattgagattccttgaggtcaacattttgaattatttatctgacatttcaaatatatcatgttgtgtaaattctatttctggagagttaaggtgatatccggcgtcttgtaattgtgttttttcatacttccacaattgcttacctgcttgcttttcattggctaaactatctcttactgtttttgaattcattttgattttcatgaaaatttcattccctttagaatgtgaatataacgtatattatgtgggtcttttgatttggttcttggtttactcattggcaaaggctctgtaagagtttcttgtatatagatagtcattatttagtggctttctgaaactatggttgtagtaataatctactgggcctgtgagcaggctcactgcctcctgcaggccctaaatagtggaggcctcagaaaccatttcttatttgcaatgcacttgtttcagcacattttatattgggatgttaagttcacctacacattagtatgtgtccttacagatttgagctgactgtggtagaagcagatgagtacatgcttgatatctgtacacagggagaagctctctgttgcctcaggcgatggactggtctatgaagtgcacagtgacttgagttctctgatcagcccctgagtgggggatgaagctggacagagatgagccaccgagcctggcaagcaaaagcgccagccttgatggaaatggcgagctgaggggcatctactcagtgtggtttcttttgttattaagagctttagtgtggtggctttttcaaattcccgttgtagtagtaacatactgagcatgtgagcaggcccgcggtcttttgcggggttggaatcacagaagtattgagaagctaatctcattttcaactgctgtacactggtggtattgagtttgtatgaggtcatgcagtttgaacgtcaggccagtaggtggtgctcgcaggtaagagccggctatggtggcagcagaagggtttatgctttaccggtggttaaagtgggaaatttgtcatgttccagatcttagagaaaagacttttagctatttctcattcattataatgctgcctgaaagtctctcgaacataactttttattatgtcgagatgtgttctttctatacccattttttacattttttttcctgaaaggatgttgagtttcatcaaatgatttttcagcatcaattgaaaaaaactatatgtcgattaaagatctaaatgtaaaatctaaaactataaaaactctggataataacctaggaaatacaatttaggacattagaactggcaaagacattatgaagaaaatgcaattttaacaaaatcaaaaaatggcaaatgagccctaagtaaactaaagagcttctgcatagcaaaagatactatcaacagagcaaacaggcaacctaaagaatggaaaataaaatatttgcaatctatacatctgacagggtctaatatttatagcatacatgcaattaaacaaacatacaagaaaaaaagtgcccaaaggacatgaaaagacacttataaaaagacctacatgtggccaacaagcataggaaaaaatgctgactatcactatcattagagaaatacatattaaaaccacaatgaggtaccatctcacatcagtcagaatggctaatcttaaaaaaataataacagatgctgctaaggttgcaggaaaaagggaacatttatacacttctagtgcaagtataaattagttcaaccattgtggaaagcagtgccatgatccctccaataacctaaaacagaagtttcatttgacccaacaatcctacaactggacatatacctaaaggagtataaacgtataggttcattccagcactattcacaatagcatagacatggaatttacctaaatgcctgtcactggcataatggatagagaaaaatgtgatacatataaccatggaatactatgcagctaagaaaagaatgaaatcatgttctttgtaggaatatgatggaactggtagtcattactcttagaaaactaattcaggaacagaaaaccagatactatatgttctcacttattttttggagataaataatgagaaatattctctcagggcctgagtcttccatattcaaaaaaaaattctaaaataagtgttcaacaagttgccgacatgcctttaaatatcctgtttcatctggaccccttatatcactcaataaagccatgagaactatatttaaaagtgggattctatgataataaataacttaacagtaagaataggaaggatatggatggttttactaatttaatgggtacataactgtggtatacactatattcctatgaataagatattctgatttcagagctaagtattgtttcctacgttgtgtgtgtgacttggttgtgttggatttgagagtgtagcacgtgcacagaccatgtggatcagaaatccacatgtaaagatgacaatctatggatgtgaactacaagtatgtaagtacttcaagtaattctatttaatggagtttgaaataaaactcaaacttattcaaaacactaattacttggtatttattttgagatctatgagtttatcaagaaattcaaattcctatttctatttaaactcccgattcctactctcagtgggagggaaaactcacagccaatcacacatcacaggacaaatctgtaaacgaagagtcattcctctgaaggtcctgggtgttcaggactctcaggcaggtgctgaggaccctgtcttgggagtgcccagcagatctcagaaccctacatggggcctgctggacactcatgtgggataactagtcgccacttattcagagttaccagtgagctttgactgttccgaatgggaccagcatggagtcaaggtgcctgctcaatgtcagagacagcgatggtctcagaaacaatccaggtaatctctaggccaataaaatgtggattcacagtgagaagtacatcctggaggtggagcttgttcttcagtgggaagagtgctgtgcacagaaagcttagaaatggggaagggggtgcgtttcctcaggcaggattagggcttcgtccctcagcgtcccactcttgtatggctgatgtggcatctgtgttttctttctcatactagataaggctttgagctgtgaaataccctgcctcatgaatatgcaaataacctgagctcttctgaggtaaatataggtatattggtgccctgagagcatcactcaacaaccacatctgtcctctagagaaaaccctgtgagcacagctcctcaccatggactggacctggaggatcctcttcttggtggcagcagctacaagtaaggggcttcctagtctcaaagctgaggaacggatcctggttcagtcaaagaggattttattctctcctgtgttctctccacaggtgcccactcccaggtgcagctggtgcagtctggggctgaggtgaagaagcctggggcctcagtgaaggtctcctgcaaggcttctggatacaccttcaccagttatgatatcaactgggtgcgacaggccactggacaagggcttgagtggatgggatggatgaaccctaacagtggtaacacaggctatgcacagaagttccagggcagagtcaccatgaccaggaacacctccataagcacagcctacatggagctgagcagcctgagatctgaggacacggccgtgtattactgtgcgagaggcacagtgtgaaaaaccacatcctcagagagtcagaaaccctaggggagaaggcagctgtgctgggctgaggagatgacaggggttatcaggtttaaggcttttttgaaaatgggttatatatttgagaaaaaaataacaatagaaacaagtacacactctaattttaagagatatattcaattcaagaattgtagaagccgaattcacagtgggaaaggccacactcaataaagttgataaaaacattccaggaaggtgctactgtgaacaagttttcaaattagatgaataaataatttggagcaatgttatttgatcatgaggtgagacagtatgattcttaaaaagtggaaaaaattctttcaaatgtttctgccactctttatcataaaattaattttagagcagttttaggattacaatgaaattgcacagaaggcatgagaattcccatgactccctgccctacacaggcagagcctcctccactatgaccatccagcaccacagtcacaaatcagttacaatggaggaatctccaaggacatttgattctttcttttttggtgatgccctaatataacaagcctaatttatctcggaataccacaagttttgttcagtggatttctaggaatcatattagttagagggaaagttggtgaggctcttactatttgaactcattcttccaaaatccacaaaacatatattaatttaaagcttatcttacttctggtttacaggatccttcccagagagtaagatttttaagattttagaggcaggttcatgtctctaaaaggccagcaagttctggggaatcccataatgaacatcctttcatgggaattggagaccctggcaatgagagactccatgtataatgccctagagttggattagatgcactgtgagctcttgggtggtggttctgaaaaaggtggtctgtgcagtaaatgcaaacacatgcacgggacacaggaaggagcaaaagcttccctttacaaagtgtgtgggcacctggaagaaaccctcacaagggcacgtctcacccttaatgactgcacattagccaggggcatgatcatgattggtcttacaaggaaagagcaccactgaggtcataggttatgaaaatgtcatcctccagctgagaaattccatctgctggcatgtgcgtgtcaaccccgtggagggtgcactctgggagttgacgagatgcatagaaacctcctgtcatgaattatcgtctaccacacagtcagaatcaacctgtgctccagaaagagatacatgcctgtagaaataaacagagcttaaggattttcttacctgctgaatatagtgcccaaaaccacactttcaggaagattagctcagaaatgtttacaaagtgactgaagggcagtggcgggtgaggtgatgggacagcctcagggctgcacttgaggagggctccctctcccatgcaggcttttcctccaggagctgcatcaggaactcacagaggataagggagaattctgagaacatgctactgtggtactgcctagagaggaaggataaatgatgacaaatacatctctgagtaacatatgggcatttgttcatgaaaactgttttttctgaaagcttatgaaggtcttgaaatgcccctgattagctgaggacaaacatttaaaccctccttccacagggagttcaagcaggctggatgtgtcctgctatggatgatcttccccagccccttcctcttcccagctcatccctggctctctgtgtaaaaagttttcatcagtggaaggtggttgatgaagtgaggtcttcaatttcctcatcttctctgtggtcatgttattttcctcatctgaggtttaaaaactcacctgcatgcagcacatgacaggctaaaatctcttgtggacaaaacagtaacaaaggcacccaccatggttgagcacccgtgttgctgacagtgaccaccaagggtcaacgtcctcttcacaatcctgtgtcagagcagcacttgagtgatttcactagcaacttcccaggagaatcggcttaaaactacttgtcgcattttccatacagatataacacatctattttcctgaagaaatagaaagagctgaatgctgaatacactgtatgtctgctggttctgcaagtttgtgactatcactttctaatttctgatctgtgtggaccaccctccagatttttctcactggtgtgaccagccttctggatgtcaaatataattaactttttttcatataaaagtcaacacaagctcctcatggtttcggtgctcactgactactttaaacttacacaatatgtttctttattagttttgttttctggtatctctactcagcatcttcaacacacccatgttaagatgcttgtacaggtaattgttaattttaaatttactggtgtttagtttaattaaataggcaggcaatagcttagaatttagaaacaacaatgtaaaggaaaagtaaatgcaataaaatttaacataagaaaaccagcagctgaaaggaagggaaatctattctgccacctaagagggtatggtgacctcatagtacaacgaacttctgcagtttaatcgatactgctcacaagtgatagcattctctctctttatatcagagcattccctaacatgtacaataaagagtgagcagatacctccaaccagactgaccagtacctctccctgagtgcctcagctgatagagatagacatcacatttgtctaacaaaataattacaggctgtaaggatacccaccagtcatatggagataatttgaaaaacttagtcaaagcccaaaccttataggtagtcatttatacttagaagaattaactcttatcttcacatgtatttttcttaatcatagagaagctactagagtcactgtccaagttactgaatatcttattcctagaatgagacattgcacaatgtgttctgacatgagggaatgtagctatagttaaaggataggagatgtgatcacggaaacacgagtctgcgatccagcagttctttctccctcacatttgcccagaaacaaagaccccagcagaaaaatggaagggttgacttcagtctccaaagtatgatgtgagatatacgtcaggtatttcatgccattgttttatagtaggaaatttaatctctaaagaaggtcattttcaggataatactattctccaggatacttaaatgcccgaaaacagagagcgctacagtgcccagtgtccaggagctacctggcacgggtctggaaaccagtggacagaaatatcagtttctcttaccacatgtatgttggaaatttgaagaatgtttctttccttcttcgtaatcataggctgcaatggactggaggtcccagtacataagaggaaatgtgtctccagtaggaacacaattagtcccataaaataattgtgctcacactgtggtgcccacactgttggaccagctgactgagaaagtgttgtaagagctgcagtgtctactgattcctatcatatttggggctacattcgcagctaccaacggaaagagagagaagtaaaactggcttaggtagagtctatggatttgctttctttccttcaaactgaagtaaaaaaaaaaatcacatcaactaaaatggggacgatgatgaagtgatcaaggacaagagccactcagtgttttaggtgggttttaacctaaagtcccacaacatgtgagaacctgaactctggagtccggggcatctctggggagaatgtggaaggtgggcgggaggaaacagtgattcatgtctagggaaatttcagggctacctgctctgggggaaaggaaagcctgagcctctccgacagtgtcctctgttaaaattgttggctgacttattgtattcttcaacaccaatatttttttagtcctcttttaattttgtttttattattatactttaagttctagggtacatgtgcacaatgtgcaggttagttacatatgtatacatgtgccatgttggtgtgccgcacccattaactcgtcatttaacattaggtatatctcctaatgctatccctcccccctccccccacaccacaacagaccccagtgtgtgatgttccccttcctgtgtccatgtgttctcattgttcaattcccacctatgagtgagaacatgtggtgtttggttttttgtccttgcgatagtttgctgagaatgatggtttccagcttcatccatgtccctacaaaggacatgaactcatcattttttatggctgcataggattccatggtgcatatgtgccacattttcttaatccagtctatcattgttggacgtttggcttggttccaagtctttgctattgtgaatagtgacacaataaacatacatgtgcatgtgcctttatagcagcatgatttataatcctttgggtatatacccagtaatgggatggctgggtcaaatggtatttctagttctagatccctgaggaatcgccacactgtcttccacaatggttgaactaatttacagtcccaccaacagtgtaaaagtgttcctatttctccacatcctctccagcacctgttgtttcctgactttttaatgatcgccactgtaactggtgtgaggtggtatctcattgtggttttgatttgcatttctctgatggccagtgatgatgagcattttttcatgtgtctgttggctgcataaatgtcttcttttgagacgtgtctgttcatatccttcacccactttttgatggggttgtttgttttgttcttgtaaatttgtttgagttcattgtagattctggatattagccctttgtcagatgagtagattgcaaaaattttctcccattctgttggttgcctggtcactctgacgatagtttcttttgctgtgcaaaagctctttcgtttaattagatcccatttgtcaattctggcttttgttgccattgcttttgctgttttagacatgaagtccttgctcatgcctatgtcctgaatggtattgcctaggttttcttctagggtttttatggttttaggtctaacatttaagtctttaatccatcttgaattaattttcgtataaggtgtaaggaagagatccagtttcagctttcctcatatggctagccagtttttccagcaccatttattaaatagggaatcgtttccccatttcttgtttttgtcaggtttgtcaaagatcacatgcttgtagatatgcggcattatttctgagggctctgttctgttccattggtctatatctctgttttggtaccagtaccatgctgttttggttactgtaacctcgtagtatagtttgaagtcaggtagcgtgatgcctccagctttgttcttttggcttaggattgacttgacattgcaggctcttttttggttccatatgaactttaaagtagtttttcccaattctgtgaagaaagtcattggtagcttgatggggatgtcattgaatctataaattaccttgggcagtatggccattttcacaatgttgattcttcctacccatgagcatggaatgttcttccatttgtttgtatcatcttttatttcattgagcagtggtttgtagttctccttgaagaggtccttcacatcccttgtaagttggattcctaggtattttattctctttgaagcaattgtgaatgggagttcactcatgatttggctctctgtctgttattggtgtataagaatgcttgtgattttttcacattgattttgtatcccgagactttgctgaagttgcttatcagcttaaggagattttgggctgagacgatggggttttctagatacacaatcatgtcatctgcaaacagggacaatttgacttcctcttttcctagttgaataccctttatttccttctcctgcctgattgccctggccagaacttccaacactatgttgaataggagtggtgagagagggcatccctgtcttgtttcaattttcaaagggaattcttccagtttttgcccattcaatatgttattggctgtgggtttgtcatagatagctcttattattttgagatatgtcccatcaatacctaatttattgaagagtttttagtatgaagggttgctgaattttgtcaaaggccttttctgcatctatcgagataatcatatggtttttgtcgttggttctgtttatatgctggattatgtttattgatttgcatatgttgaaccagccttgcatcctagggatgaagcccacttgattatggtggataagctttttgatgtgctgctggatttggtttgccagtattctattgaggatttttgcatcgatgttcatcagggatattggtttaaaattctctttttttgttgtgtctctgccaggctttggtatcaggatgatgctggcctcataaaatgagttggggaggattccctctttttctattgattggaatagtttcagaaggaatgctaccagctcctccttgcacctctggtagaatttggctgtgaatccgtctggtcctggacttttttaggcaggaatttccttgtcctaataagcccaggagtgctacaggagaccagggcttatttcatccctcagcggcgaccgtaaaagacagccatcccgaaagcagccatttcagaggcctcccctcagggatgcattctctttctcagggatgttccttgctgagaaaaagaattcagtgatatttctcccatttgcttttgaaagaacagaaatatggctctgttccacctggctcaccagcagtcagagtttagggttatctcccttgttgcctgaacattgctgttattctgttcttttttcaaagtgcccagatttcatattgttcaaacctacatgctctacaaacaatttgtgcagttaacgcaatcatcacagggtcctgaggctacatacgtcctcctcagtttacaaagattatgggattaagagactaaagtaaagacaggcataggaaatcacaagggcattgattggggaagtgataagtgtccatgaaatcttcacaatttatgttcagagattgcagtaaagacaggcataagaaattataaaaggattaatttggggaactaataaatgtccatgaaatcttcacaatttatgttcttctgccatggcttcagccagtccctccgtttggggtccctgacttcccacaacagtttattaactttgtatgactaataatgtaaaatgttccccatatttttagcaatgttttacttatttgtgaaaggtgtgtttattaatttttcattttaaggtgtcacatttatctttcttgtttctgggatttcattctagtagatatagctgaatgcattttaacaattattgtaatcatctcacattttatatttggatttgcatatacattttattaagattttgattttgatataaaatattttcttacaattgtctcttttctatttttatgagataaaattaatgtatgcataattgcatacatcttcaatgtacagtttcagggtttctgacatatgtgcacacatttgtctccagcacctaagttaggatgaggagcaggtcagtctccacaacaagtgtcctcttcagtgcttccagtcagctctcacataaggatttttatttaatttcaagttttcattttcactaatcatcagagaaatgcaaatagaaaaacgttctggtttctgtcactacagttcaattttttcctgttttgggcatcacataaatggaatcaaatgttatagttcattttttgtaaggggctacttttgctatttgtgaggttcattcatgtatttgcatctaccaaggttttgtcatcatatatatacacacacacacttatatatgtactaatgcacatataggtatttcatatctcaatcagtccattacgttaataaatgacagtttattaagtaaatccattcattaagtgaataagtgacaaaaaatatatctattttcctgttgatggaatttagtttccaaaataaatatcgtaaacacatctgttataaatatctttgtacaagttcttctgcttatatctcccatttttattgataaaatatgtataaatataagtatgcattataacttttcagctttatggagctataactgacaaataaaattgtatgaatttaaggtacaccacttgaggtattgatatacatggggaaatattcatcgtgatcaaagtaattggcatgcctatcatctcagagaatatcattttatgcctttaatttattgtgagtctgtgatgaaaacacctaagatctactcttctggaaacagataagtttataatataatattcattagtatagttacattgctgtatgtttcatctccagaactccttcaacctgtgtatcagtccattctcaaactactttagagaactacctgagactgggaaatacatgaagagaagggagttagttcactcacagttctgcaggcttagcaggaacttatagggaggcatcaggaaaattacgatgattgtggaaagtgaaggggaagcaaggaccgtcttcacatgctggcaggggagagagagaaagagcaaggggagatgcgccacacttttaaacctcaagatcttgtgagaactctaacacaagaagagcaaaggggaaagccgcctccatgattcagtcactccccatcagacccctcctacaacacttgaggatgaaaatttgacatgagatttgggtggaaacgctgagccaaacagtatcattatacccggccactcacaaatctcatatccctctcacattgcaaaatataattatcccttctcaacagtctcccagtcttcactcaattcagcattaacacaaacttctacagtccaaagtctcctctgagacaaggtaagtttcttggatgtataaccctgtaaaataaaaaacaagttagttacttccaagctaatatgagatgaatgcactgggtaaatgttcccattctaaatgggagaaattggccactacaaatgggctacaggccccatggctagtccaaacactagcagggcagtcatcaaatcttaaagctccaaaaaaatttccttttactccatgtctcacatccaggacacgttgatataagaggtgatctcccaaggcctttggaagctccacccttgtggctctgcatgttagactccccatagctgctttcataggctggcattgagttgctatgtcttttccaggcacaccatacaagctgctggtggttctaccattctggggtctgaaggacagtggtcctcttctcacagatccactagacagtgcccaagtggggactctgtgtgtggaatccaacaccatattttccttctacactggcctagtagaggtactccattagagctcagcccctgcatgagacttctgcctggatatccaggcattatcatacatcatctgaaatctaggaggaggttcccaaacctcaactcttgcctcatgtgcaccagcaggctcaacaccacgtggaagcaaccaaagcttagggcttgcaccctctggagcaatggcctgagctggaccttgaccccttttagccatggctggcacaggacagacagggatgcaaggcgccatgtcccgaggctgcacagagcagtggcgtcctgggcttggacaaagaaaccatttttctctcctgggcttctggacctgtgatgggaggggctgccacaaagatctctgaaatgccctgcggacattttttcccaccggggtccttgttacttatgcaaatttctgcagccagtttgaatttctccccataaaatgaggttttttgtctaccacatggtcaggctacaatgttttatcaaacttttatgctccgcttcccttttaaacgtaagttccaatttcagaccatctctttatgaatgcacatggcttatgttttcagaaacagccaggtcaactcttcaatgctttggtgcttagaaatttcttctgccagatataccttaaattatgtctctgtagctcaacatttcacagatctctagggtagggggaaaatgccactagtctttttgctaaagcatagcaagtgtgaccttcactccagttcgcaataagttcttcaccttcatctgacaccacctcagactggacttcattgcccatatcactatcagcattttggtaaaacccattcaacgagcctctaggcagtttcaaacttttccacatcttcctgtcttcttgtgagcactccaagcttttccaacctctgcccattacccagttacaaagtcacttccacattttcaggtatcttaatagcagtatcccactcctggtgcaagttttctgtattagtccattttcacattgctataaagactacctcagactgggtaatttatgaagagaagagttttagttaactctcagctctgcccgctaaacgggaagcattattgggaggcatcaggacgaacaatgatggtggaaggtgaacgggaagcaagaaccttcttcacatggtggcaggagagagagagcaagtgagcggggaggtgccacacttttaaaccatcagatctcttgagaactttatcacgagaacagcgaagaggaagacaatcccatgaccaaatcactttatcttaggcccttccttcaacatgcagggtctacaatctggcatgagatttgagtcggaacacggagccaaaccatatcaaccttcataacgggaagtttttaccctttgaccaacaatacccaattttttcctcctcccagcccctgcgacctactattctactctgcttccaagagcttgaatattttatactttagattctatatataaatgagatcatgcagcttttgtctttctgtgtctggcttattccacttagcataatgttttctatttgttgcaaatataagaatttctttgtttttaaaggctgaataatactcagttttatgtaggtataagccacattttatctgttcattcgtagatggacattgactcgttttccttatctagactattatgaataatctcacaatggacatagatttgtcacactcagtttattttctctagatgtatgctcagaagtggggatgctctatgtccagttcactgagtaatcttcatgttgtttttcatactggctgtaataattcacattttgttccaaaccatacatggatacctttgtaccacatattcaggtctttgtgtaactcttgaatccatttttagctgatttctgtgtattgtgtgaggtgagttctatctatttcttctgcatatggatgcccgtttttcacaccactcgttgaagagactgtcctttctctactgtgtgtcttgggaacttgacaaagatcagtttattaggaagaaatgggttggtttccaggttgtgtttaatgttccattggattatatgtctgtttaaatgccagcattataccattttgatttatatagatttgattttgaaattatagattatgatatattcagctttgttatttatgcccaaaattactttggctatttgaagtcttttatatttttatataaattggagctttttaaaaacattttgtaaaatcatgccatggagattatttatttattttattggcatatagtagatatacctattttatgggaacatgtaatatattgatacatttataaatgtgtaaagattagtgtaagatttacatatctgtcacattaaaaatgtaccctttccttgtgctgagcacatttgaatgactcctttcgctattttaatgttgtgcattagattattattaactatagtgaccttactgatctatcaaacatttaggtcttatttctcctctataaatgtatatttgtatacagtaatcaacctctccttatctccttctctcttctatccatccaggattctggtaagcaacagtctattctatcttcaggcgatccagtattttagttttgatgtaaaataagaagatgcaatatttgtctctcttttattggcttatttatcttaacataatgacttccagttccattcatattatagcaaatgacagaatattgggtttcatggctgaataatatcctatcgcatacatagattacatttactctatccatttgtccacctacagacactgaggtgctttcacatctgggctattgtgaaagagctgcaaagaacatgggaggggacatgccttcatgaggtggtggtggttttatcttctttagaacatacccagaagaggatttgccaagtcataaggtatttctgtttttaatttattttggaatcttcatactactttgcacatagtggaaacacaaatggagtaaacattaaaaaagcagtttcggttttgatgtataatccagaaacaaataatgtttgaccatgattctcattaggagtctctaatggatctggtggaaatgcaggaagttttctaaccttgttcaggaaattatgagtttgcacctttttctttttgaggcttgaaattggcatgattcatgatgcatactgttgggaggtttcagaatgatatggcaaaaatcataatgaaaaggcaagacagagagagagggagagagagagagtcaggcctagaaagagaaaaaataattttctcaacaggagaaagtgctggatatctgtatcagtgttgagttttgctcatagacacatctgtaccgagtgaggaaccatgaagtcaagggaggggtctagaacttgttcaagtgaagcatcagcatatttctcacaggcaccaatttccaccacatcacaagggtgatgcatttttgaatgccattaaatatgagttcacagtcagtaatcatgtttccatgaaattcagttaaaataccaagggtgtgtccagatcactcatgcacaaatacacaaaatttgctttttcatgtgtggctatctagagacaaagtgcactgaggagacttcagcaggttacagagatttgcttaagtttggaaaaccatagaagagtgcctttaagtgaaggttggtatataaattaaataggtcaaaatcccctctatggagtagcgttccaattgtgtggaatttttaattccttattcagttgtaaaacataatccctaggactgactccgtggagttttactgctgtgttgacaaaaatatctaacaagcttccttccagtgtttcaagggaagtttttctctaaattttttccaatgtataaattttcctggctaaagatagtaaaaggctgttaaaaacacaactggaatggcagctttaatcttttgctgattgataggagtgagcataatacatgaatctctttgagtgttctgcctcatccaaatacaataggtcaaaggctagtactggaggtaagatttccaaatgtgtttttttccagctaccaagtcataggaaaataacagatacatccttgagacagaggaccataatgccacaatgctggtaggagtacatgtagacaagggagttcaagggtttcttaaaactgataattttaatgtaagaataccattcttttaaacttatgtggaagactgtgggaggttataacaatgccatattttagtatcagccctgcctcacagaatcattttataacagttcctttcatgagtgtgcttcactcggttcatgcaaaaacctggcagatcacaggctaaaaacagaaaatatagaagcttttaatcaactgaaagagctgtagcctttgtcaaggaattattggaagacacagagaacacagatagatgataaataaaatacattcatatcccgttaagtgtggaaattgaggaaagtttacataaatgtgtccaagtggcaaactgtttatttaatctggtaaccaatttttctataaattgtagagttgaaatgcaacaaatacatatttgaaatgatctggcacaaattaagcaaatatggtaactatgtattttcactcatttttatttaagatcagcggctcagcattgatatttttgataatatctgtgactcagcagctttaccttttgaggatatgatctggtatggcagttttcttagcttcaatgttacctctttttgcattgacttccacctttatatctgccaggaatctggggaaaaggagtgcctgtaaacgttccctaacttgcccattttggtgggttttccagaatgtgtgagatgctttttttttttttttcaaagcatcctgaacccatgcactgccctgaaacatgtttatttcctagtttaacaaattggcacttctaataaatgcaatctcttctgccatctgtgctgattttacatcagatagaggactgtgttctaaaggaaatcttatattagtaagagcaattttgtcattaacctagagttttattattgaggtgtgattcataacatataatattaggtagaggttctcagtggcagtgtctaaatctcttgggtgtacagtgtcttccccgttaacatgaagcatttacgagcacagtcatagtttccagccatgcttctccctgtctcacaatcaccacaaactaactatgaccacaactggaacttggtgagttattctttaataagttttaagtttgtctttaatctttatgcctctagattattatgtgagacataatctttatgcctctagattattgtgtaaagctatttcagaagaaagttaaaaagaacattttaactgactaaacaacacaggaaatcattaataaaatgcaaagtgtagatgtgagaggctccaggcctggataatgcaagagttcatgtatgcaggcagtttctttgcccaattatactgatacaaccagcatgtcagcttcatgccccatttgactcctattatgcaagcgcatggaaatgacatgctcaagggtcacacacagatatgaaaactggtgggagcaggagaggagacgactctgcacttctcctctgaaggaccaggaaagcctggacagaccatctccccagcctccatgactgcgcgacgtgcccacatggacactcatctctgacaagataagaagactccattgatgaggctgaacattttatgatttaaattactagagacttacattgaggtttcaataactaatttttataacccaaatttacttacccccatgttgttacctctttcttcagtgaaaaattgcttttgctgtaattgagttttaggaagattcccagtgttcacaactgagcttccaagagagtgttgagaacaaaaactgaatgagggcagagaaacccatctttactgtgttcaccactaaactcaagtggactcggcactgcctttgatcactgttgcttctctgcagagttcaggtttgtatttctcacaattctaacacagactctccctctcctcaaaggtttggcctccactggctgtaaggtcacactgttctgaatttcttgtctgaaccgttttatgagggtggtgatgagccatttaatggaaattttatatcatctcagcatgaatcctatgggcggtcacgaattattattctgattatggtaattgatttttctcagcatattcattactagtgatattcaaaaaccctttttatttaaatctttgatgcttcatttttgttgctatgacactttttcttctactgagtcttcccactagcattataacatgacctaatatccagggctcagttgttatataacaaccacatatgtcaaaagctatgcattcttttcacagcagacataattttctcttttctggagatgaacacacactggctgagctacccccactcacaagaacatatggaaaatcatgacatttttatttacttgactaataaattatgtcattctctcttcaaattctttatcccccagaatgccatgacaaactcttctgcatctgttcaaaccataaactcagaaaccacatggtgagtaaaagctcacttgattcgggatattgggtcaagctcttcccctccaatgtcccacagcattgggacctcagcccacctgtccaggttctatcaagagagtttagctccttcacagtgaaggaaacaattgagttaagagggaacctgcagaagatagacaatattgaaaaccattcatatgacaagggattactatcaagcatataaaataaactcaacccaactgcaaataataatgtggctaataatggaggaataacattaatacatatttctcaaaagaagaaaagaaaaagggcagatagatgatagatagataaatagatatattagtatgtatacatacatatatcgctagaaaacactaatattcaggaaaatgcacattcacaatgagatgtcttttcatcctttatctttgcttgagagtcagaaaatctaaataaataaataaataaaacaggagctggccaggattcatagaaagggaaactcttatagaccattggtggaaatggaaattagtgaagccatcatgggaaaaaatagaactaccatataattcacaatccaactgctgagtatgtatctatttaaatcattaaagtaaaaaactaatattgaagagatacatgtacacccatgtttattgcagcactatccaccatagctaacatatgaaatcaacatatgtgtccatcaacagatgaatggataaataaaatgtgttatatttacacaatggaatattgttcagtcttaaaaatgaaattctgctgttagaagcaacatggatggaactggacaccatcatgttgagtgaaacaagacagacacagaaaaataaatacagcattttctcagtgttatgtggaaattttaaaaagttgatcttctagaagtaaataatagagtagtggttatgagatgccgggaatgggaggagactgagagacaataagaggtttgttaacaaacgtataatttacaggcagataggagggatgtgctccagtgatctacagtgcagtagggtgactgctgttaacaatatagtgcacattttatgtttacaagtagccagaagacagaaatttgtatgttaccaacaaaaagaaatgttagtgtctaagctgatgaatttgttcattgttctgatttaatcataccacatggcacacatgcatagaaatatcacactgtaccccatacagttattatgtgctaactttaaaaaatcctttaattaaaacagattttatttgcatacattacaaatgcttcaacacagagccaggaataaataccatttttctttgaaatgtgaatttcctaacaacgtagttacattcatttgaaccaaaccgtgtatttgatcatggtaagaatagacaggcttatgcatagaatgatatattttaattttagacttctacttaataccataaattcaaataattttaaaacaactaagtaaaaactataaagttgaggaaatgtgtacgtggtgtgtgatgtgtgactttttccttgcgcaccactctgtccatggtggatgtgtggtgtgggtgtctgtgtctatttctgtttactctgcttgaggttctctgtgattctaggatctgtagttcagtgtctttcacaaaactgggaacgttcttagccattatttctttcaaatactgtctctgtatctacaatttctcctttcagatttaaaatgtacatatacaatactttttaatattaatgtttactttcttcactctcttttccttgcactttactctgtaaaatttctagtggtattttaagtgagtggtttcatttaaaaggtgagccagctctactgaagggtgtgcccaaagcttactcaatgtttatactgcattgcttttgatttcttatgcatttccatttgattttttcttagtattttcaactctcagttccctatctagtccttcattatgtatacagtttccttaatagatttttacatatgaattatagttactttatatatcttgtttaattagatagttctaagatccatatcatatagaagtctcattctgatcatttgtttattatgactttggtatttctcattaatatatgtaatctttgttgatagccagatattttaggttggacagttgatattggcttattacttcattttatgcattttctgcctgtatttgaccatactttatttttgccaggcctttaatgtggaaatgtttgaatcttctcagagctacatttgacgtttacttttgcagtagacgtcatagttgaagtctgttcttctgtgtccaccagagacttcagatcctccagtgataccttgtttttctttcctgcttggctttgtctcttcaccctgttccttcctccagagaatctctttcagctccttcaggtggattaagatattatattgaactgacaattgtgaaattggtggaaggcaatagaataaagggagattttctgacctttcatgggtctatatttctacgaaggcattgtgaccctgagtctgggtgtgacattgccggtgtttctgaacttctgccagatgagatgttggtctgtgtgttcttgctgttttccctgctgtggagtcctcttgttttccccagttgttccctcccacagctccaatgttctcttttggtgttatcagcttccagagttgatgacctgacctagagattaaggctctgattaaataagaaggaggggagatacttctcaatggaacttaggtgaagacctctttttccatctcagttcctaagggatggccccagtgcccctaagatcctggctttggtggcttgctcctgcagagtaatttcttagttctgcaatggggattaaggaggtgggtctgaatgcatttcagagtgtgggctctttttctctcccagacagacacattgggacaaaagatttttgtgactgtccccatttttgggaaaaaggtttcaaggtataggaaagctcttcagtatgtggtccctgagaaattcacgctacaacacatttaccacacttgacttcaccaattcagtatgtatgtatttttttctcttataatagcctacatttttatatgccagactctgcctcagttcaactcatacccatgcctttttactctctgcaagaacttgtctctccctaaatttcggatttgatgattatcttaaaacctccagtatttaaagtatattttaaaattggcaaaattccatctcctgtgtttatctgttatgttgatgctgtaaaacagtaagtaaaatatactcctcatctatgtacattttgaagctgagttgcaggttttttggtaagacccagagtcacagagaattcaaatattgttaagctgcttaatagaaaaacaaattatggtaaatgtgttcactggaatactacccatgatttataataaataaatgcctgacacacagaacagcagcaaaaccacacatgctcttattacagaaagtggcttctgaaaaccacaccgggcacgtacagctttgtcctggagttggtttagggggatgtcagagccagtgacgagaagcacagggccagatggcagcgttcactcatcccagacatgagctcctggatgcatacagagcccccccatgtgtgggtttacttccacttctgtaaaaggagaaaatactgactcctacagagcataatttacacattttttaaaaaatgtaatagggtgatcagggcaaagtgtttatcacagcacaatttcataagacagcatattttccaaataccatcattgtcagcaaacttctgcagagcaccgtcttcttatatgggtacagcctattcctccagcatcccactagagcttcttatatagtaggagacatgcaaatagggccctccctctactgatgaaaaccaacccaaccctgaccctgcaggtctcagagaggagccttagccctggactccaaggcctttccacttggtgatcagcactgagcacagaggactcaccatggaattggggctgagctgggttttccttgttgctattttagaaggtgattcatggaaaactaggaagattgagtgtgtgtggatatgagtgtgagaaacagtggatttgtgtggcagtttctgaccttggtgtctctttgtttgcaggtgtccagtgtgaggtgcagctggtggagtctgggggaggcttggtccagcctggggggtccctgagactctcctgtgcagcctctggattcacctttagtagctattggatgagctgggtccgccaggctccagggaaggggctggagtgggtggccaacataaagcaagatggaagtgagaaatactatgtggactctgtgaagggccgattcaccatctccagagacaacgccaagaactcactgtatctgcaaatgaacagcctgagagccgaggacacggctgtgtattactgtgcgagagacacagtgaggggaagtcagtgtgagcccagacacaaacctccctgcaggggtcccttgggaccaccagggggcgacagggcattgagcactgggctgtctccagggcaggtgcaggtgctgctgagggctggcttcctgtcgcggtctggggctgcctcgtcgtcaaatttccccaggaacttctccagatttacaattctgtactgacatttcatgtctctaaatgcaatactttttttgtcctttttgtttctttgtttttttgcaacaggagtacatatcctcagctccacagaagccagggtgtcactttgggggcagaaataatcgtttcgtggtcaacaggatgagagtcctgaggaatcccagggaaacctggagagtgttttccaattagactcagggcagagacctccatgggaatttctgattagaacgggctttgagctctgatgggagccaagagacaggctcacccagggtcggggtccttaaagcctgatggttttcacagctatcccccctcgtcttgtaaactcagactgattcagttgaccctttttctgctaatccattttgcttctctgtaggtttgattctcacagttcgctttcttcttctcttccctgagaacaaacgatgtgttttctgttttcagggaaaatcccagggctcaggtctgcaggacctgggtaggctgaggagactttctcactcaccattgtctggacactcctgttgtcttctgtgcatggaggcatttgggaaatgaagtggacattagtcattaagggaataatactagttttctccaattggatattgatgtagagctgaacttgtgcttctcacactgtcacagagtttggaccctcacctataactttgaggagagttgatgatggatagtccattgtgggtgagctctgggtaacagtaattgtagggtctggctaggcagcctaaggtcaatacttctggacctcaggaaagacaggctggaattcctgggaagacctgcatctgccatccaccgtggagtcccatcatcttctgttatgctgtgattgaatcagccccacctagtttatctagaacactcttcatgacttaggaaaacataatggcaagctctcctaacacctgtatcatgccatgggagcaacacctaagctagtgtgtgattgagtagatgagactgtgatctagtcaagacgacaggtaaaattgattgttgtcattatgatattttatatttggcaatataatcatgctcatattataaatacttttgctacattttttgagtgtgtcagaggctttggaactggaacaacttcatcttgaataggggctaggaaaaataagaccgagacctgctgggctggattcctagtaagttgatgcagtaagttagtcacaggatgagataggaggtctgcacaagatccaggtcataaaggccttgcagataaatcttacagtaaagaagctgggcaaagccctccaaaaccgagacagtggctaaaatgacctcagtttgtcctcactgttcattatactctaattataatgcattaacatgctaaaaaacactcccttccagcccccaagacagtttacagttgtcaaggcaacatcatgaagtttccttgtgtggtttaaaaaggaggggaggaacactcaacttcaggaattgcctggaggactcatgaataatccatccattgtttaacatataatcaagaaataaccataaaatggacaaccagcagcccatactgctgctccacctctggtgtagccagtctcattattttacttgcataagaaacttgttttcattttaatctgtggattttccccaaattgggacccctttctcctaatatttgtgctattattcgtgttctgagcagaaaaccccaagatggaatgaagtttccctacatttttataagaagtacattcacccctttgagcgaaaatgcacagggagtggaatgaggctgggaagctaatggcgtatgatggaagcttgtccctgactggaggagagagggagggaggattgggaggaaggttcctatatttttgtgctatgcaaggaagctgcaaaagataactgagtctcgtgtaagtcagtgctacctctcaggggatccctgtgactccaagaaagggctcttcttaggaatcactgtggagtcagtcctttcattagagtagaccacaggacatgggcctcagcacacgccatgccacagatgtcagaaagcagctgctgggaacctgatccacctgcattttgctgcctgtaggaggagggagggaggtgcattctcagggtcagcacactgtttgtgaatttttatagagaacccctgcttttgctgtatttttattggaaaatatatgaacaagtgtgcacctgcaaacaactgtaattttcacatttccttcagttgcattatttcttaatcctgaatgacgtcctgacacagagttgagtttttcacaggcattgttcgaaggatcgagatgatggcattttccacattcactggtttttctccatgtggcagagaccttgagtagagcacatctggcccttatccacactatctcttgtgtcccctgggaaagagcagagatttgcctgactgcagaatctggggtaggagtctgcacacctctgagcctgcagagaagctcagcgaagttttgtggagtcagagagctttccgtgtggggaacctctagcttcctcactctcggagattaatggtcagctgtacttgaggggttaagaattagagcaccttgggagcctgtctcatcacagttccattatgtaacttaccaccattagactgcgggtaataactcaatcttgatttttctgacccgattttttcatcttattcattactaattttgtttatggaaaatgttatgtttagtttatgattaaaacctcagaactttctgaacttatcaggaataatacaaatgtgtccagtttgggggaaatgtaaatgaatgtccatgcagtttgggtgtgtgtgtgtgcgtgtgtgtgtgcatgtgtgtttgtttgtgtgtgtgtggatatgtcagtcacttacaccacaatgaacatgattgctgaattacatagtcaaactaaaattagatttgctgaaaattgcctgcagcgatgtctgtgaagctgaccctgtcactttgctgtgaagaaactcagtgtacaggcgaggttgcacgggagagctaaaagcttctgcacacaggacaggctgagctcctgaactggagccaggcacaggactgagcacctgagaaacagaacccccagccctcctttatctgggctggatgggcaccagaggacccgcaggagatgctcagaactcacacaagacagagcctcagtgaggagcagaggcagcgaggaaccagtccagggagccctgtgaccgccacctcgggttgtcttattttgcttaacagcatccaaacctcaggagaccatttattacgttatttagacttccatgccctttctgtcccgaagtaaaacaaacataaatatgactctgcagttagctctttgaacctgggttatttttctgagaatgtcatcttcgtcatcaacatcatggtcatcatgtcaaaatcaacaggcaaatccagtcaccgtgaagacagtttcatggcatgattcatacacaatcattccattccacagagaatctctttcagattcttaaggtggattaaagtgttatatttaattgccaattgtgaaattggtggaagacattatactaaaggaattgtctctgacctctcatggggtcatatttccagaaaatcattgtgatcctgagtgtgagctgactttccaagtgttcccaaccctcctccagatgagatgctggtctgtgtgttcttgctgcttcccctggggcagattcctcttgttttccccagttgttccctcccacagctctcataatctctgttggtgtccccaacttccagatctgctgccatgacctgcagattaaagctctgattccgtaagaaagtgaggggagctgcttctcaatagagctttgatgggaacctctgttcatacctcaattcttaaggggctgcaccagtgccctaggatgctgattttcatggcttgctcctgcagggtaatatcttagttttgtagtggggatcagagaactgggtctggatgcatttcagaagtgtgagctcattctctcccagacagatactatgggaaaggaagatgttttgcaggggtaaatgattcaagagattagggcaactctccagtatgaggtcccttagaatttctcactataacatgcctaacacactcgacttcaagcaatccagtgtatatttgttcttcatcttgtaatagcctacattttatatgacagcctctgcctcagggaatttcatactctggcttcattactctctacaggaacttgcctctccctagatttcaaatattttgtttgttttcaaccctcaattatctgaagcattaagtaaaatttgcaaacttccatcttttctgtttatctgttattgttgatactattgttgtaagaatgaatatatgggcccggcgcggtggctcatgcctgtaatcccagcactttgtgaggccgaggtgggtggatcacgaggtcaggagatcaagaccatcttggctaacacggtgaaaccccgtctctactaaaaatacaaaaaattagccaggtgtggtggtgcgcaccagtagtcccagctacttgggaggctgaggcaggagaatggcgtgaacccgggaggtggagcttgtagtgagctgagatcgcgccactgcactccagcctgggtgacagagtgagactctgtctctaaaaataaataaataaataaataaataaataaataaatatgtgtgtatatatatatatatttctcatctatgtacatttttaagcttagcagcatattttttagtgagatccagaataataaaagaatccaaacatttttcagctgcctaatagagaaacaaattctggtaaattttttcactggaatactactcaacatttataataaatatatttctggtacacagaacagcaaggaaaagtatctaagtatttatgctgagtaaaataagccagacaaataagaatatgtactatattactccatttatgtaatttatttcaaatgaaaaaaatctaaagtaatatacaaaagatgagtagttacctgggaaaagggtagaataaaggaaggggaaatgtggaaacatacagaagaacaagagaaaatgttgaggggaactcacttgtccacctcagtaatgatgacgcttacatcatgttttcaattctacactttaaatacgtgaagtgtattatctgccaattaacactcacaaaatttattgcaagcaaacaaatgaaaaattagaccaaaagcggtggtataaagatacaaaatatccattaaaagtcagaaatatatgagaatttgcctcctgaaccctagttctctccttatttttaggtgaatgctagagtgccacaaaaatcactcaagttctcaatacaggaagtgggttccacaaagcacactaggcatgtccaattcttacctggagttggttcagggagtaactggggccactgatgtggagcacaggccaagctaccagggctcattcatctcagacatgagacacacacagcccctcctccgtgtgtgggtttatttcacatctgtaaatggagaaaccattgacttctacagaacataatttacacaaatatgtaaaaatataatagtgcaaaatgtttatcacaacacattttcataataagacagtgtattttccaaataccataattgtcacccaattcctgcggggccctgtcattttatctggggtctgccatctcctcagggttcccaccccagagctctctgtgtagcaggagacacgcaaatagggccctccccatgctgatgaaaaccagctaaaccctgaccctgcagctctggcagaggagcctcagccccgggattcccaggtgtttctgcttggtcaacactgaacatacaggattcaccatggagttggggctgaggtgggttttccttgctgctattttaaaaggtgatttatggagaactagagctattgagtgtgaatggacataagtgagcgaaacagtggatatgtgtggcagtttcttaccaggatgtctctgtgtttgcaggtgtccagtgtgagatgcagctggtagagtctggagcaaacttgacaaagcctgggtgtccctgagactctcctgtgcagcctctggattcaccttcagtagccatagcacgcactgggtcccccaggctccagggaagggtctgcagtgggtcccagttattagtggtagtggtagtaccatgtactacgcagactctgtgaagggccgattcaccatttccagagacaataccaaaaactcactgtatctgcaaatgaacagactgagggcagaggatgcagctgcatatgactctgtgagagatacggtaaggagaagtcagtgtgagcccagacacaaacctcccttcagggtacctgggacaaccagggaaagcctgggacactgtgcactgtgctgaccccaggggcaagtgcaggtgctacaagggctgggtttcctgtcttgatctggggctgccttgttaccaaattacccgagggaacttctctagatttgcaattctgtactaacatttgatgtctgtgactgctaaacttccctcacatatttgttttttgtttgtttgttttgttttgttttttgtaacaggaagacccatcctcacccctacagaagcccgagtgtcaccttgggggcagaaatgaccctgccttggtcacattgatcagtgtcctgaggaagcccagtggaacctggggagtgttttccagtcaggctcagggcagagacctccgtggaaatctctgattagaataggtttgggattcagacttgggccaagagggagtctcacccatgggagggtccttaaatcctgacagtttttacagctgttctccctcctctggcaaaactgtgcacatctgactcagaactgatccagctggcccttacttgctaatcaatttttcttctctctacacttcattctcatagttcccttttcttcccttcccagaaaacagagagtgtgttttctgtggtctaaatctcagggctcaggcctgttacctggaactcaggtgtggcccaggctgtggctcctgtgagacctggggaggctgaggggactttcccactcaccattgcctggacccgcctgctgtcttctgtgcatggaggcatttgggaaatgaagtggacattagtcactgaggggataatggtagctttctcaaatgagatactgatgtagagctgatcttctgtttctcacactgtcacagaatttcctccttcatctgtgactttggggaaagctaaggatggacactctattgtgctgtgagctctgggtgacagcaattggagggtctggctaggcaaatcctacagggtttcaggtcaatggagttggaatttctgggaagacctacactgtcatcctccatggagtcccatcatcatctcttatgctctgatggaatcagccccacctaggttatctaggacaatcttcctgacttaggaaaaaaatgatggcaggctttactaacacttatattataggatcagtacaacacctaggttagtgtgtaactgaataaatgactctatgagtcaaggggacacataaaattgattgttgccatgacatttatttatttatttatttatttatttattggaaaccagagttttattgttactgaaatgagtctcgccaagcattcaagaatgggattttttaaggatagcttggtgggttgggggcagccagtgagtcatgagtactgattgatcaggtcagagataaaatcatagggagctgaaggtgtcttgtgctgagtcagttcctaggagggggccacaagatcggatgagccagtttattgatctgggtgatgccagctgatccatcaagtgcagagtctgtaaaatatctaaagcattgatcttaggctttataatagtcattttatccccaggagcaaactaggaagggttagaatttgtagccaccagctgcatgactcttaaaacataatttctaatattttggctaattcgttagtcccccaaaggcagtctagtccccaggacgaaggagatttgttttgggaaagggcagttattgtctctgttttaaactataaactaaactaagttcctcccaatgttaggtaagcctacacccaggaatgcacaaggacaacctggaggtttgaggcaagatggagcaggttaggtcacagctctttcactgtttcagttgcagctttgcagtggtggcttcaattcctccctttgagttttgaccttatcgacttgttttgtttctctttaagtgatggttttataaccatctatgaaactctaacaggtgctctcacatgcagatttctgattaaaaactctgaagatggttacaatagtatagagataaaactatcaaatagaagactatcttttttgacttttcacttaaaatgttgcccaagaaaacttttcttttgagctatttatagctttcaacaattgagtatagtcctgtacataaaatttggagaatatttgtttctctctgtccactttctccagaatttggaaactctttgtgaatatccttaacttatggcaatatgatttttcataagtgcagtaagattttttttttttttgcaacaggacacaattggagaaactggttattttaccaaggctttgactgtaatggcgtgcttcaccttaagcaatcgaacttgacttatacagccaataagagccccttgggaaaactggcctgtaccttgtccacacagtctttgtacaaggttcctgaccagtggtaagtaaagaatgtcactttctaacaggcccaagaaccccatgttttcctgggaccccagaggaaaaataatttaccagacttacaggtatttgatggtaaaaactcatggctgggcttggctttaaaaaagtcttatctgagattccttatggaacagagttccaccaaagccaattttaaaagcctgtgtaaacaataattatttgtattgtgctttatgcaaataataaggccatgaataataagactaaagtttattttgcaaataaatcagtcctatcttgatttgttttaaataaaaatggggacaagagagaaaaaaattatgctttaaaaatatagtacacctgttgtttgctgttcttgtttttttttcttcagcagtttggacgaaattctaaattatttgtaggctacaaagccataaactaatgcgttcaaatctttacttttaaaactgcgaattgcactccttaccccagttctcattatgtactttatagtatgttgttccctccaatgtggtgctggaattatagatgacagcactgacagctttgccatgcaagccttggaaccccacgcaggcctgcgtgagtacactcagacagttgcaatgaggttccagtcctcttatcttgaggtcagcacctacccctactacgccccaggtcatcaataaaaagttgtaacagtcttggcccttcttacatcttcattatccaacaccatgatttttgttttttgccaaaacaattgccaaatatagtcataatcataggataaataattttgctgaaatatatgtgttattattggtcttttgagatggaaagtccaagactggattatgctttcatgcatttttcataagaagtacttccactcttttgacaggaaacgcacagggggtgacatgtggctgcagaagctgatggcatatggtagaaatctgtccctgagtaaaggagagatggacggaggattgggtgaaacattcttaggtttctgtgctgtgcaaggaaggtgtaaaacatatttgagtctactacaagtcaacattacccaagggggaacccctgtgactccagcaatgactctgcctcagaatcactaaagagtccttcctttcattagagtggaccacaggatctgggccatagcatagacgtcagaaagcagcagcttgacacctgatccatgtgcattttcctgcctttaaagggagggagagaggtgtattctcagggtcaacacactctttgttgatttttacacagaacactggcatttactttatttcattgaaagatatatgaacagatgtgtgtctgcaaatgattgtaattttcacatttattccaattgcataatttttaaattctgcttgatgtcctggcacacagttgtgttttctataggtatttttcaataaatcaagaaaatacattttccactttcactggcttttctccatgtgcagaggccttgagtagatcatgtctgactattagtctgttttcatgctgctgataaagacataccagagacttggaagtttacaatagaaagagttttattggacttacacttccacatgactggaaaggcctcacaatcatggtggaaggtgaaaggcacatctgacatggtggcagacaagagaagagagcttgtgcagggatctccctttttacaatcatcagatctcgtgaaactcatgcagtattacatgaacagtgctggagaaacccgcagccataattcaatgacctaccactgggtccctaccatgacactgggaattatgggagttaaattcaagatgtgatttgagtggggacacagccaaaccatattattttgccccatggcccctcccaaatctcatgtcctcacattgcaaaaccaatcatgcctttcctacagtcccccagagtcaacttgtttcagcgttaactcaaaaatccacagtctaacatctcatctgagacaaggcaagtcccttccacctataaacctgtaaagtcaaaagcaagttacttcctagaaacaatgggggtactggcattggataaacacacccatccaaatgacagaaattgcccaaaacaaaggggccctctgcaagtccaaaatccagcagagcagtcaaatattaaagctccaaaatgatcccctatgactccatttcccaaatccaggtcatgctgatgcaacagatggtttcccttggtcttgggcagctccacccctgtggctttgcagggtacagcctccctcctggctgctttcacaggctggtgttgagtgaatgtgccttttccaggcacatggtgcaagctgtcagtggatctaccacactgggatctggaggatggcggccctcttctcacagctgcactatgcaataccccaatagggactctgtgttggagctctgaccccatatttacctttctcactggcctagcagcggttctccatgagggtcccactgctgcagcaaacttctgcctggacacccaggtgttttcatacatcttctgatacccaggcagaggttctcaaggaccagttcttgacttctgtgtactcactggctctacaccatgtggaagctgccaaggcttggggtttgcaccatctgaagccatggcctgagccctacattggcgtctttcagccatagctggagtggctggacacagggcaccaactccttaggctgcacacagcacgggcaccctgggcctggaccacaaaaccacttttgcctcttaggcctccaggcctgtgatgggaggggctgccgtgaagacttctgacattcacaggagacattttccccattgtcttgaggattaacatttggctcctcattacttatgcaaatttctgcagctggcttgaatttcacctcagaaaataagatttcttttctactgccttgccaggttgtaaattttctgaacttttatgctgtttcccctttaaaactgaatgcctttaatagcactcaagtgggctttttgaattctttgctgcttagaaatttcttctgccagacaccctaaatcatctctctcaagttcaaaattccacaatttgctccagttcccaatgagttcctcatctccatctgagaccacctcaagctagaccttattgttcatataactatcagcatttttggcaaagcaattcaacaagtctctaggaagttacaaactatcccatattttctggtctttttctgagccctgcaaactcttccaatctctgcccgttacccagttaaaaagtcacttccatatttttggttatcttttcagcaatgtctcactctactggtaccaatttactgtattagtctgttatcacgctggtcccaagactggacaattcataaaagaaaggtttattggacttacagttccacatggcttgggaggcctcacaattatggtggaaggtggaaatcaggtctcacatggtggcagactagagaagagtgcacatgaaggaaaactcccctttttaatccatcagatctcatgaaactcattcactatcacacgaatagctcaggagagacccatgcccataattcagtcacctcccatcaggttccttccatgacatgtgggaattgtggaagttacaattcaagatgaaatttgggtggggacacaaacaaaccatatcactgaccttctccgcatcatctctcatgaccccagagaaagagcagagatttgtctggggtaggagctgctcctgtggaacttagaggctgcagacgaccccagtgcagttttatggagtaagagagttttcccatgtctgggaacttctagcatacccactgccagagattgctggttggctgttattgaggggttcagaattagatcacctggtagcctatctcactgcagccccattgtgtaacttaccaccaatggccttcacgtgaggactcaatgttaactgttctgacctcattttcttacctcctttatttgtaagtttggttacagatttttttttactttaatttcagggatatgtgtgctgaatgcgcaggttttagtttcttattcaagccttataattgctcaactgatcaggaataatacaacatgtatgcagttttggggaaatataaatgaacatccatgcaaaattttttgtttggatatgtccgtcagttacacccctatgaacataatagccggtcctcaccagaaattgctggtcctcaccgatctcaaaagcatctagatcttcaacttcctagccttgagaattcagaaaacaatgtttatgatatttctgagccacccatttaatggagttctgttatagcagctgaaacagactaaaccatttaccaagtctcagtaagggcagtgaggatccaccatgcttgagagacaagcattactctctcatttgcagctcaggatgacagaagcatgatcatgagctgatctgaaaagaagatgtggctttctctccctcggatctcagttgaagccatggtgtcacatctctatggtggagactaaattccagtctgtgatgtaatggatgcctgcctcctcccaccctcacttacgagacagagtttccatgccatgcgttattgaccaagaaccaagaaggactccaattattctcacccctgctcacttgtatggcagaggttctggggatattcctgggagaggcataatgagactatttaagtccacgattcccaaacagttttatgctcttaaagcaggagtatcactttgagatatatgaataatttcatgtgcactaaggtggaggctgttatatttttataggtaaagatgcatggcataaagacagagatacagcactctggaaattgtgtgactatgtttgcagttgactgtgaataatttttaccatgaagttatcctaaaacacataatatatttttactgtaagtaattaatgaaaagctgacagctccacaagagcaatatccacttggtttagcagagagaatgagaaatagcataatttaagaataatcagttagacactgtgccatgtgcctgtattttcaactagtgaggatgctaatgtgggaagatcacccaagcccaggatttcaaggccagcctgcaagatattgctagacccattttcttaaaaaaaaaaaaataacattctgggtcatgacaaacctcaaaaactgaccctctaaataggaacaaatttaattgcattaaaatgtggatgaatttttgacacaaaacagtgacagcatgccagcaatgagtacagaataacatccagttgttatgttaagagatacagactccgaaaaagagacatcaggtagaggctgtcaaaggcctcactgcctaatgactgcttttccattgatactgtgtgtatatcccggaatgcacctgtgaatgaggacatcatgtctttcatagtgtgagagaaagagacattactacccatctgacaaaggattgatcagaatataccaggatctcagacaactctataggaaaaatatctagtaatccgaataaaaagcaggcgatatttatttcttaaaataagactttcaaattgcaaacaggcatataaaatgtgctgtgtaacactgatcatcagaacaatgcaaaacaaaactacagtgaaatatcatctcatctgattttaaaatgatttcatccgaaagccagacagaaacaaatgctgggaaggatatggagaaatgagaacactcataacctgttggtgggcacttaagtttataaaaccactatggagaacagtttagagtttcctccaaacctaatagtagtgttgtcatataatccagcaatcctgctgctggcatgtactccctcccacaaaaaaaaaatgttgtttgcactaccatgtttgttatagcactgttcgtaatagccaaaatttgaaagcatcctaactgcccattaacagatgatggataaataaaatgtggtacatatagcatatggattaatattatgccataaagagaatgagattttttcatttgcaacaacgtggatgaaactggagttcattatattaattgaaataatcccagaaccgaaagacaaacttcacatattctcatatatttgtggaagttaaaaattaagacaactgaactcgtggagatagagagtgaaaggatggtcaccagaggctgggaaggtctatggtagatggggattattggggatgctcaatggatgaaaaaagtggttagaaataacaaataatacatagtatttgataacacaacagactaagtataatccttaataacataattatagattgtaaaataactaaaagtgtataaatggaatgttggtaactcaaagaattaatacttgaaaggatgtaggaaccattcatcataatgtgagtattatgcagttcatgctatatcaaagtcaggtaccccataaatatacacatataccatttacccacaaaaattcaaaattaaagtatttatgtatctcatcttctgtatctatattacattaaacctaagaagatactggtttcttcacactaccaagatccacatagacatccgtagcttctttctttgcctgtccataatctgacattgaaaaatgaggaaacctttcctatcatatgacattaatttacttagtgcacaatttcaaaatacacaaattgtgttagaattattaaactgacccttgttgaaaatatgtttatcgactagaataccgtgcttatatgcagcttatttatattttacaatcacaacatcaaattatttccaaagatacttgtttctgatattcatgcccccctttctgcagtgaaattagtacaaacctgtttatcattgttagatatttttatacagctttcattttattctgtgtttcatgaccagctaaatacttttgaagttgtatgcatttaggttaacactttgtctcaaaaaattatgagttttcacaaattatttatgccatgtgtttatcattgaacaccatgaaaatagtttcattgtgattaaaaagtgtgtgtttcacctaatccacacaccttttccccagattcctggaaaaccacaaaggtttactggatctatatttttgtctttggcaaaatagcctggctattctcttagcttcttctgcaaagcatcaagattcaccttcactgactgcagcatttattgggccctgatggctggaggagaggggctggagtgggtggtagccatgagtgacccaagtggaagttctcagtggtgctctgctccagcacaaagaagattcacagttcctggggacaacacttaacatcacaatctcccttaaaattatctactggaaagctgaggagtaggcagtgtattactgtgagagacacagtgagggacatatgggtgagtctagacgcaaacttccctgcaggaagacaagaggggactttgtggtaaatggtgctcagaaccactaggggacactcagaaccactaggagacactcaggatagcagaaggtgctcaggatgccgcagggtgctcaaaacactaggggtgctcaagaccagcagggggcactcaggacaccaggagacacttaggacatcagggggcgctcaggacaccagggggcgctcagcacaagcaggggccacagaatgacaagggtgcattccagaccaccaggaaacactcaggaccaacaagagattctcagaaaccaccaggtgtaacaggaccacctaaaggcccacaagacaaccaggagacactcatggccactgaagaacattgaggacaccaggggttcagggccaacagggagtgctcggggccaccatggggctttcagtaaccacgagggaatcaatcactcaggacaccacggttttcttaggaggcagctccacatcaggtgcctggggaaggtgacgtttgcttttagacctagctgattcctgagctggtcaagcaaaagtcttcccacgatctctcactatttcttccttgtaacccatggtttctttcacatacaaatcattaacttaggataggaattcaattcaacttttaaccttgcatatttttagaataataatagcaatagtaattcaatgtgttttgataataagaaattgtgtatgcctaattcaaactctggttccacgcatgggtttttgtttcttgtgctgtgccagtcacactacagtcaatgcttttctaataataactcaacaatgtcacggtgttaagtttcctttcattttgtctgccatttgtggagatgaaacaccactttcacgggtcagttcctccactttggttgggttctggtcttctgctcttcacactgtttctccaccttcccttctgtcaaatccttttgtcttcctcagtctcctggcaaagaagcaacaaatctatttattttgtctcctccacgtctggtgaatctgttcacttctcttcatgatcattgaacccaaccatgtttagaaggataacagttcaccttacaatatgctcatgtaggtcaggtgcagtggctcactcctgtaatcccagcactttgggaggccaagacgggtggatcatctgaggtcgagtttgagatcagcgtggccaacatggcaaaaccctgtctctactaaaaatagaaaaattagccaggcatggtgtcgggcacctgtaatcccagctactcgggaggctgaggcaggagaatcacttgaacccagggtgagaggctgcagtgagctgagataatgccacttaactccagcctgggcgacagagagaaactccatctcaaaaaaaaaagcatatgttcatctatccgcagactctctgacatcgtcacccttttctagggtcctgcagacatcaccccacaacatccagtccttttcctaagtaccacagagtgggctctgcagctcctgctgctctctgtgtgctcagcgctgaggctcaccagtgctttgatgatgaagttcaaatccctaatgtgtttgcaattctcagacaaccctctagcaagctgccattgtgagtgcattctggggatcctgggctgatttcaggtccatattgctggatgttctctagcatccaggcgtgttggcaaataaacatctagaatttgtattgaaaatttgtggaaaatcaatggtagaaaacaatcctaatttctaaataagaacattttatcctgactttataaaaacacaatgttaatttaaccaataatgtaataaaatgtgtttaaagtgatgtttatcttgttattagatgtattaataattggtattttaaagtatactaacagcataaatgacaaacaaaccaacacagcgattatacataaataccattgtacattaattaatttggcaagaatggcatttattttcatttctaccaaaccttgcctttaaatatgtttgttaattggcattaggatagtgaaacaatcacacagagcaacaacattttggaatattacattatactataaaatagtacattcgattcaattatataattaaaataacattaaataaattcatgttttggtttgatatttggatatgtgttcatttttgtattttctttttttgtatcttttgtagagatggggtttcaccatgttggacaggctggtctcgacttcctgacctcaggtgatttatcgggggaacccacccccaatatttcaatgtagggtctttctattttctgtaagtgtcggctggtctgagaaataaagagaaagagtacaaagaaaggaatgttacagctgggccaccgggggtgacatcacatattgataggtccgtgatgccccctgagccgcaacaccagcaagtttttattagggattttaaaaggagagggggtgtacgaacagggagtaggtcacaaagatcacatgctttaaggggcaaaaagcagggcaaagatcacatattccttccccagggtattaattactaatattccttgctgggaaagaatttagtgatatcttccctacttgcacatcagtttataagctctctgcaagaagaaaaatatggctctattctgcccgaccccgcaggcagtcagaccttatggttatcttcccttgtttcctaaaatcgctgttgttctgttctttttcaaggtgcactgatttcatattgttcaaacacacatgttttacaatcagatttcatattgttcaaacacacatgttttacaatcaatttgtacagttaatgcaatcatcacagggtcctgaggtgacttacatcctcagcttacaaagataacaggattatgagattaaagaaattatgaaagtattgattttgggaactgataaatgtccatattaaaatgaaatcttcacaatttatgtttagagattccagtaaagacaggtgtaagaaattataaaagtattaattttgggaactgataaatgtccatattaaaatgcaatgcctagggccaacaaaggagtcatattaatatgaaaaataatagctgaatattttggaaatgacacatgcagtaacaaatgtctatatgaaattaagaagatattgacacaaaattgagaaaaaattaacataattatgctcactactggtttataaaatgcctataataacactttttaaatcatattatagaaaataaaataactatataaatagcactctctttgcttgattttagtatttggtgcttcaaatgttttttatacaaataaacattggtcattttttgatggtaatttcaatattttcttccagaatacatgttcataaatgtaattgaaattgtataattttcagaaacttattttatcagttgtgacttgtatttttatgatagactttttacatttatatacttttgattcagaataattatagataaaaaaattataaagttaatacagtgtgttcccatctccaagtatctcctaagatgaatatcctctatcatcataagacatggtgttaacacatttacattgataagtgtaaatatattcaataccagaccttattttatttatcatttttccaataatttctattgtaaatgaaaaataaaattctaagcttcctcaagcaactaaatgaactcaaccctcagccaagggaatttcaaagtaaattctaaaacttgttccagcaatgatgggaaagtgagaggtcagacatgcctcattacatgctcctctctttggaattaaggcaccagtggccagcattagtactacaacaaagatcttaagacgggcaaaactatatttttgctgtaaacactttctatagcaaaaagacatcaaattacaacttgattctagtatagcatcacatgacaaatagcaaaacctaatgatttattctgtatgaaatctgctacctggaggcttcatctacataataagaactatgatctccaggaccccttatcttaatccagacactcagttgtaatgattgtattaccttacatttcaaccaattgccaatcagaaaatctttgaattctcctatgtcctggaaccctgtgcataaactttcctgcctttctagactgcataaatggtatagctcacatgtgttgattaatatctgcctgtaacttctgacccactaaagtatataaaatcaagctgtaatcaagccattttggacatgtgttctcaggaattcctggggtcgtgtcatgggccttggtaactcatatatatctcagaatgagccattttaaatatttcatagtttgtcccttttagtggatatcttcttttcttttttttgggacagaatctctctttgctgttgctttcgtatatttgtttgtttccagattccatcaaggccatcagtttgaattcagttgtcttgttcctttattctcttctggtaaatgacagtttgtatttctgaagttttctagttgaatattttatagataaaaatttatcaagtaggttgatagtgccatttgggactcttatatctttacctatttaatcattgcttgttttctcaatcacaatgagtgttgatttctccatgttctatacatgttagtctattttctgttccaaatccatttattaggtcttttaaaatggattttggaaaagttgatcctattattttatgcaatatttcacttgagttgcaaaggtattctttttatgattattttgtctgaaattaacatagctattcaagttttctttggtttatattttcatggtctatatttttccatcttatttcttctctttgtgaatatgttaagaagttttcttggagaaagataattgctgggtcttttttttttttagtcaactatgaggaattattttttaatgatattacccttttgtccaataatggttgttttgtctttttacaataatatgtattgtttctattaatttattatttaattattattgatgaatatcttattggttaccataaggataacaataagacatttctataattgaattctaattcaaaaatgtagtacttctttctctttcttatttctttgagacggagtctcactctgtcgcccaggctggagtgcagtgggacaatctcagatcactgtaagctctgcctcctgggttctcgccattctcctgcctcagcctcccaagtagctgggactacaggcacctgccaccatgcccggataattttttgtatctttagtagagacaggctttcaccgtgttagccaggatggtctctatcttctgacttgtgatctgcctgacctggcctcccaaagtactgggattacaggcatgagccaccgtgcccagcctacccctttatatatagaacagagatattataactatatatgtctaattcctcttttctatcccttttttattttatcagtttgtaattacataagctataaaaatgtaatattgacatttttataattgctttacacatttatgtaataaagaaaacacaaatgcaaaaactaaatttaaacctcatttttttcattgttgacaatctttatcttttggatacattcaggtattggatgtatatcatatggctgctcatctagaaactctgctaaaacgtctatggcaagattaatatgctgggaatagattttctcaggatttgtttgtccgacagagtatttatttgtctttgatttatcatctcaagagacaatgtcaagaagatgctgtttctgcaaatgggcaatctgcaaaccaaggacacgtcactacattactgtgcaagagaagcacatgaggaaaggccggtgtgagacacaaacctccaggaacacctgggctaatgagctgcagggggcgctcaggacccactgatcagtcaaccacagaggggagtgcaaaggttaggactgctttcctgcaagcattgaaaaaagaagaaaaaaactccgtctgacagtttctccaaggaacttctgtaattttagaattctgtgcctaccaatgacatctccaaatatttttttaaaatattgtgtttggaggacatactctcacatggacaaaacacaaattgacacagagatgaaaagccctcaaccatagtcaccaaaattggagacatgtagaagctcactgggacctgttgagtcttctccaatcacactcagaacagagaccttagtgggtctcccttagagtagtcattaaggatggtgataacagcctaaagatggtagaccatggtcagtgtcatatagaatatggggaccctcacaagttttttgtctgacccttctcctgacactaaattatgcaaattaataacactgatctggtgcttcttttgattctaatttattttatttttagttgtcgttctcacttttcctttggattttcctgctccctggaaaaggtaaatgtggtctccgtgacctcaattcaagggctgaagccctttccctgtagctcagctggggctcaggctgtggctactgcagccatgtggaagaggctgaagggactttcttcactctccttgctcaggaccatccactgtattgtgtataggcttctctggaaatgcaagtggccatttgtagtgaaagaaatatgtttgtctggttaaaatgggaggtggatgtagagttaattggctgctacataaactgtccttctccaccagtgcttttaggatgagattgtgaaatttgtaagaatcaaaatggagtcacatatgttaaaaccctgacaaatggattcaggaagtgtagggagaattcttacacacatatccctgacaacaagaactatcataaaatagttcttgcaaaaagaccaacatgacctcataatcatgacttctgcaaagacttctactcagaatctacttgcccagccttagattaatgccatctgaattacactgatcatgttactatcactggtcctcaccacagatgcaacaccctcctgagtcctgaaacctgactccatcccatagagtagggcacagatgaggggaatgcaaatctccaccagctccaccctcctctgggttgaaaaagccgagcacaggtcccagctcagtgactcctgtgccccaccatggacacactttgctccacgctcctgctgctgaccatcccttcatgtgagtgctgtggtcagggactccttcacgggtgaaacatcagttttcttgtttgtgggcttcatcttcttatgctttctccacaggggtcttgtcccagatcaccttgaaggagtctggtcctacgctggtgaaacccacacagaccctcacgctgacctgcaccttctctgggttctcactcagcactagtggagtgggtgtgggctggatccgtcagcccccaggaaaggccctggagtggcttgcactcatttattggaatgatgataagcgctacagcccatctctgaagagcaggctcaccatcaccaaggacacctccaaaaaccaggtggtccttacaatgaccaacatggaccctgtggacacagccacatattactgtgcacacagaccacaaagacacagcccagggcacctcctgtacaaaaacccaggctgcttctcattggtgctccctccccacctctgcagaacaggaaagtgcagctgagatacgttttcctgccagggcctgcatttcccatccccattagactcagagccctgtcttcctccttcttctttaataataaatggcatgactcctgttaatagttcatagaagcagaagctgagtcctgtttgtcaaacattcagcatgaaatgttcatgttacctgggccagatgcatcactggtatgtggccgccagtttaatgggctcatactactccaagcggccgaatacaaaacagcagaacatatgcctttattaaactgcaggaaatgacactggagaaaaatgtggggataagggagcaggaggaattgtgaaaattcagataatagcttttctcgtagagagaaaggtgcgttaataaaataattttataaaacaataaaacagatggaatgtgtccccatcacggagtgtctcacagtaacagtgcagaaataaatttctaaaaatgtcgtagggtaggtgtgatagacaaggcttatttccacacagggagcccataaatacccatgtaattaaaaatccagctcttagaaagggagtgcctcaacttgacatcagaaacccacgtcagtgagtctgaggagcaatgtggaaaagaaatggaaaattcaacaatacctttcttatgaaaatcctagctcacgtttcaacatgaaacataactgtctacaattttaggaaaaccatcccatggcaacaagtcactacactcaaaaggtactgagctaacagagttccagcagtgagcaggtcagtgctgaaatccccggagaatcaaggctctcaggtacgttgtacaaaacccagaactgagccacacaatctatggtcaagtgatctttgacaaagtcaacaaaaatatgcacggggaagaggccacgctcttcatgccatgttgctgggacaattggactgccatatgcagaagaatgaaactggacaccaacctgtcgacatatacataaccataagaaaatggactgaaggcttgattataggacttcaaaatataaatgtactcgaagaaaacaccaggagaactcctctggacattgggcttagtaaataatttaccacaaaaacctcaaaagcacaagcaataacatcaaaaatagatgaatggaatttagttaaactaaagagcttccacacagcaacagagtgaacagacaaattgcagaatgctaaaaaatatttgcacacattgcatctggcaggggactgataggcagaatttacacggaactgaaacaaccccaccacaacaacagctatgaaaaaacaaataacctcattaaaaattggcaaaggacacgagtaggaatttttttaaagaacacatataactggacaagtgctaaacatcactgattatcagggatatgcaaattaaaactgcaaagaggtatcttacaccagtcagaatggctactataaaagaagcaaaaatagcagacatcggtggcgatcaaaggcaaagggaagtctcagtcattgttggtgaggatgtagatgagcacagcctctatggaaaacaatgtggagatttttcaaagaaataaaagcagaactacctttgattcaatgaccccaccattgggtaactacccaaaggaaaaataaatcatcatatcagaatgataaccaaacttttgttttcctgcagaactattcacagtagcatagatatcaacctaaggaattaacctgtgtcttacaacagataattttatttaaaaagtcacatatatatacaattaaatactatccagccatattaaggaatggaatcatgtattttgcagctacatggatggaactctgggtcattattttaagtctaataaacgagaagtagaacagcacacaccacactttttcacttataaatgggagctaagtaatatgtgcacaggcccatagagaaaggaatgatggacattgcagactcagaaacatgggagagcagaagttgggagaatggtgagaaattacttaaagggtatgatgtacattatttggatcatggatacattaaagccaagacgactatgcaatatatatatgtaacaaaattgcagtcactccccgtaaatgtatacgaataaaataaaaaaaaatacaattgaaatgtgaaattattaacagttgatcaacaatcctgaaaattaaaacgtgtgatgcaataaatgaaaataattttagttgaacttcatcaaattttaaaacattttctattcaaccgactatcaagaaactgaaggacaagcttcaggggagaaagtatttgcaaatcatacatctaacaatgtaattataataagaaccctcaaaactcaacagtaaaaagaagcaatctgtttataaaataggcaaaggtttgtgcaaactttctatcaaagaagatgtacagatgacacatcagcatatgaatgtaattttccagtagagaaattcaaatcaagaccaaaaggagacacgactttaggctttagaatgaggaaaaataaagaagaaatactgacagtaccagtgtcagtgagcatgccaggccccgagagactaaaatattgctagtgcaaaatgaaagagtttctgggagaactgtttacagtttcttataaaattaaacatgtccttaatccatgacctagaactctcatccctgagtatgtcctacaaaggattaaaatcatgtgttcacacacacacgtattcagatgtttaacattgtgtgtgtgtgtgtgtggtgtgtgtgtgtgtgtgttagaaactaaaaacaacatgaacatctttgaaaatttgacacaaaccattacaggtgaactccagactttcttctgagtgacagaaggcctgcctgaaagatccccagagacacagtcatggatttcactgtcaccctcacatgtcactggcttgggctgggctctctctggctcttccctgaccaggaccagatgttgagctccactacctgcagttggaagtttatattttcaacaatgcactgagggctaagttgctctacagactgaaccaaacaaacatgggcgcctttgaacaaacagtgcctgacatttgtactgaccccaggagaactcttcccgctctctttcttcttggttctctcctgcaggccagcagccctgcagtttagcctggacctctcatgcatctacccatctcctcccaagtgcattttaccacagcctccactgtttttgtaattctccacactctgttgtaaatgaagtcaggtccttcgagaccagattcgggactctattttatgaccaaatttcagcctcacccccactcctgagacagagctcctaaataagattctgcaggtggagattaagagcgtttttcttcctcaatgtaggagatgagtgctcagtggagggatggggaggagctttccactttaccagcatgcagatcctgctggggtggaccctctgccataggagcagggctgggaaccaggcagccaatgtcctcctccttggtgctgcactcagggcagagcctgcatccatgagtggggctgtgtggaagaagtgagtctctggttctcagtaagtcttgtctagaactgagcctcagcagcatgacctgtgggcaaggtcggagggccaatgtcctggcccctggggaagagtgtgctctgctgggagctgggcagaaggaatcctgtctacttggctgcagccatctgtggtggaatttacatcatgctgagctcgggcatagaaggaaggaagagaatctttgatcaaatatcaatatcatgtctgaccttactgaggttttgtagattatctcgaataaatgttccttcactttctgtatgttgacagggcctttccagacccgttaatttttcaaaattaatctcaccagtttcatggaggcatggatatatcgagctccttataccgtcatgtgagatgtggaactgtttccttcactggttataaaataatgggttgacttttttcccaacactttacagataccatcaattgtcctattgcttatatggttataaccaaagcaatgctgatattattcatttctattctattgcaaggtatgccccctctactcgtctccaattgctggcatgtatttccatttgtctgtatgttttagtaatttgaatatgattcacctaagagtgtttgtgtgtgtgtgggtatgtgtgtgtcgtgtgtgtgtgtgttaagggcttatcctgctatttggtgttctctgacctgcactgatccatgacttacaatttctctaatttggaggaaaaaatagagggaaagtgagtttgagtccagacacaaacctcactgaagtgagcacaggattctaaccccaggggtgctcaggacacgctgatcacaagagccagcctcaggggcaggtgcagatggaggctgagctcttctttcccgtcagcactgtggcttcttctccataaaacatcttcccttgaggaatttatctgaattcatgattttttgcttatctccaaagtctctgaaatgaaaatgtttgttttaataaaagaaaaatcttctcacatgtgtaaaagacagtttcctacagtcgcttaatcttgtctttaaatgtcaattatcaatgcttctgaagtaaatcagctaaatctataaaagacactttgtttaactcaacactgcagcccagcatgacagcactgaaagggccagcaagcagcaggcaggatacggtgcatgccagacactggggcggaaggagttagtatccagtgcaagagaagaaagtgcccgtggtggtcactgtcaggacccaagctcacagctccaattgcaggtgaccccatgcaaaggaagagataccctcaccaatgtttagtgtggatgtcgagtctgatggtgccacattcacacaccacgtgaatatggaaagatttaccaactccattattgaggcgtctgctgagggctgcacaggcctctcaataaagtccaaactggctcaatagagcaggaaagaagctgcctcagggtttttatgatggtttggtgttgaaggaatggtggggcttcctactaaggggaaggagcttgtataatttgaacctaatactggcatccagtgaggacacttccatgattttctactaaatttcccatgtgtgggggacaaaagtgaaggaaaaggattaatcctgtcatcagtaatgaggcatcaaaatagagtctgatgacttattctacttagcaacttaagcaaatgagtgaaaaatgaggtaagtgttcactctgggtggacagcaaataggtctgcagaaaatagagtttttttaagtgtaagcacataacaaaaagaaagagaagaacaaattgaacagggatcttggaccaatgtcctgggtggaagctcttcactctgtgagatcatcagcttgctctgagggtctcgggtcaagtccttcttcaatatatctcaggccttacaggatacatgggaatgctcagcttggtgtccttcactagggaaaagaaagagaaatcagactgtcactgtgtctatatagaaagggaagacataagagactccattttgaaaaagacctgtactttaaacaattgctttgctgagatgttgttaatttgtagctttgccccagccattttgacccagccactttgagccaacctggagctcacaaaaacatgtgttgtataaaatcaaggtttaagggatctagggctgtgcaggacgtgccttgttaacaaaatgtttacaagcagtatacttgataaaggtcatccgcattgtctactctcaataaaccaggggcacagtgcactgtggaaagccgcagggacctctgcccttgaaggcggggtattgtccaaggtttctccccatgtgatagtctgagatatggcctcgtgggatgagaaagacctgaccgtcccccagcctgactcccgtaaagggtctgtgctgaggagggttagtaaaagaggaaagcctcttgcagttgagatagaggaaggccactgtctcctgcctgcccctgggaactgaatgtcttggtataaaacccgattgtacatttgttcaattttgagataggagaaaaaccaccttatggtgggaggcgagacatatttgcagtaatgctgccttgttattctttatgccgctgagatgtttgggcggagagaaacataaatctggcctacgtgcatgtccaggcatagtaccttcccttgaacttaattacgacatagattcttttgctcacatgttttttgctgaccttctccttattatcaccctggtctcctactacattcctttttgctgaaataatgaaaataataatcaataaaaactgagggaactcagagaccagtgctggtgcaggtccttggtatgctgagtgccggttccctgggcccactgttgtttctctatactttgtttctgtgtcttatttcttttctcagtctctcatcccacctgacgaggaatacccacaggtgtggaggggcaggtctccccttcgtacttgagcagccttacaactgggtgggtttatgaattaattcctcggttgcattacatgaaaaatcacacaatctacaaattttaaaaaataagcctttactttttataaaagattacagccatttcacaggctgggaagcacagccattggtgaagacgagagacaggcactcccaaggaggagcggtggggcagaaactttatgctgaacgtgttggctaaacagacataatcaacggattacaggaggggctatgcgtgttcataaaggtggtcatgacacatgaatatgggagcaaacatacacgtcacatgtgacccacttagcagtggggacttagcatttaaatgtgttacagttaggccctaagtgccaaaagctggagcaggggcacaaagaccctcagagcgcagcctccataaatggccagaaccaggccatggtcagtggtctctgatcaggagaaaattcctgaaatcaatctggtgtcccatccaagctggggttatggctgtggaatggggggtcagttagtcaggggatgagctgcagttggttaaatcgtgcttatctcaggatcagtgcttattttgctgctacagaagaaaataacagtttattctttaagagttggggtgagggatgtaacccctgcctggcatggccttaggtcttgtttataacggggcatcttattgccccggagaatctgttctgtcagtcttatgatctccattttaatgttagtgttggtccatgttgtctctgaaccacaaaagggagtgggtataatgaggtgtgtctgatctcttgttctgcccagctgggaactcagtttttaggtgtttttggtgcctccttggccaagagggggaaccactcaatctcatggggtgactgaaattttacttttagtttaaagtttataaatatggacctaagtattgacattctaaaagtcactcctttgttttggctaaaagtacttggcaagagtccttgaaatgaggttcaagagcagtattttctcatgactttatttgcaatagacacatgagagactgttgaaaagatgaagtaccaaagtagccttaatctgttggtgaatggagttggtataatacagaaatcactttcaatattttgtaacacatgcatgcatgcaataagacagcggtgagcactgagtgtaaagtctctaaaggtacgatctttcagccaccaaataatagtgtaataacggacatactctggaggagctgactataataccgtaacaccacggggagaaactttggccaaggaagtccaagattttcttttccttttcctttttttttttttttttttttttttttgttgttgttgtttgagacagagtctcactctgttgcccaggctagagtgcggtggtgcgatctcgactcactgtgacctctgtctccctgattcaagcgattcctgcctcggcctcccaaaagctgatattacaggcatgtgccaccacacccagctaagtttttcatatttttagtagagacggggttttgccatgctggccaggatgatctcgcactcctgacctcaagtggtcctcctgccttggcctcccgaagtgctggtattacagcgtgagccaccacacccagccgagattttcttaaagttttgaaaattttaatttaagggttacaattttttcaacatttccagaaagctgtagacagtattattctgtgttatatgagtgattgtagttccttccatttttagatagtattacaaacaattttagggctgcttgctttaaatagatagatgatagatggctacatacatacatacatacgtacctcgatagagatatagttgcaaacataaatacatagatagatagagttacagatgtattttagttattatgctacttttttctttgccttttcttcctatgttatgttagtcaggtctccaggacttaggagtgcatttacaatcccttcccttgtccattttgacgtgttctagacaatgcgagaatcctttgtgtgtggatcacttccaagtcatgcactacccttgcaataaatgtgtttgtgtatgtctttgccttactgacaagctctgctgagtgcagttatttctgccgtctgagctaactttacacttggtagagaaatatattctagatggaggcttccactattaatttaaattactaattcataacctccagcttaattattgaggtataatctatcagagatggtattagaacaaaggtttccaatgaaatctaacagaagggatgtcaaaaaattttcctaacttaggtaaaataaccctgagcccattcttagtatccagccatgtctcctatctatcacactgaatcccacactaactttgacctgacttgggacttgtaagcttcaaatatgaccttttgattgcaatgcctctaattcaggacgtgtggttattttagccaagagtaaagaaaaccaaatttaactcgctaaaaatgacaaagattaaaacctaatgaaatggaaactgggatatgagtggctccagacttggctattttaagagtctatgtgcccaggtgatttcttttctccattttacacacaggcaaacccaaaacgtcagcttcatctcccgttgactctcatcatctcgttcttcatcagcttgcttagaatgttgacttccagctgcatccatgttgccacaaaagacatgattttattctttttctgtgaatgcatagtgttccattgtatacatgtaccatattttcttgatcaaattcaccatgaatggacacataggttggatttatgtcttaggtattaagagtagcatagcaatgaacatgtaagtgggtgtattttttggtagactgatttattttcttttgtgcatatacccacatatgagatggccgggccaagtggcagctctgcttcaaatacttttcaaatctccagactgctttccacagtgcttggactaattcacattccacccaacactgtacaagtgtttcctgttctccgcagcctctctccagactgctttccaagattcctctcctccactttgacactttggtatatccatgtgtgtcctctctggttcagccagggacagagaaccaggaagacatcatgcattttctagagggagctggcttggggaatcaacgaccggagtagaaagtgcctttgtccatgcatcacaggcctgagggccctgggcaggaggtcaggaagagaggatgaccagacagctggggaaaccgggatgaataaagccagtttccttcctggtgaggaggggcaggtcgaagcctcgtgtccctgtagggatgaagcacactcacctgccactgctacctgccaatcaggtgacctgcagagcagcagctcctgagtcactgatggtgacttcctcctcctccaaaccctctaggatctgtgcttctcagagtgggaaccccagcaggtccccaagttttcaatggattcacctagctagtgtctctcctcagccccatccccaggctcctgccctggtgctgtgtacagtgtcacaacaggggtgacagtaacagctggtgcctgcactttccaggccaagaagtttgaaagaagcaagtcacagggccagccgggatatggggtaatcacacaaatttccttcttggaggaagtgctgggaaacatccttgagtcctcctcagctcacgtgcagctgctgctgttcatcccagtgcgggggacacatgagccctccccatgcccaggatggagctgtttcaatcacagcaggatgggaatgtgtcttctctatgggggcttttgaagcacagctctcctgttcctgagatttgagatttataaagacaagtcccacagagtggacctgcacaaataagacagtacaggatccccaggagagacatcccataagagaagggacaggcgggtcccatcacagacactcatcctcagaaaccctgaccggctactcaccttcacaggtccccagttcctgatcagtgcctgtgtctgctcctgagaagagatgaaaactcaagacaaatacttctcatgatcataggcttaaaaattctcaacgtaggaaatcaaatccagtagtttatcaaaaagttaacacactgcaatcaagtaggctacattctgcaaaagcaaggctgctttaactgctttccacagtgcttggactaattcacattccatccagcactgtacaagtgctttaacctatgcaaagcaataaatgtgatgctctactaaacagaatcaaaagcaaaaaccatgtgagtattccagcagatgcaggaaaaaagctttcaatagaatctaacaacgcttcatgataaaaaccctcaaaattatagacattgaaggagcacacctcaatctgatgagccgtctatgacaaacccatggccaacatcatactgaatgggcaaacactggaagcattttccttaagaacagaaacaagaaaaggatgcccgctctcaccacttctattcagcctagtactggaagtattcaccagatcaggcaagagaaagaaataaaaggcatccaaataaaagaaaaagaagaatgcaaaccctctgttttcactgataatatgattctatatgtagaaaatattgaaggctctgccaaaagtctcctagtattgatacattcgtttaggaatgtttcaggatataaaatcaatgtacgaaaatcacagtaacatttctagtcaccaacaacgttctggctgagagtggaatcaagaacatgctctcccaatagccaccaagacagtggaatacctaggaatagagttaagccaatgagatgaaatatctctaccagaaaaacagcaaaacacatgtgaaaaaaatcagagataaaacaaataaatggaaaaataaacattccatgcttatgaatttaaacaataaatatatgaaaaagttttaaaatttgtgattaattctacgtagcaatgccatttttttcaacatttacagaatattgttgctggtaatagcagtttagcatttgagtaatggaaacaccttacagaatcactttataacagttgcttcctgtagtgggttgcttcagttacctgatgaaaacatctgcatgtcacaggttgaaaacataaaatatgtctatcaactgagaaggttgtaggcttttgtcaaggaattacttcaagtcattcagaaaaacagcagacagtaaacgaaacttgttcaaattccatggagagtcaaagctgaagaaaatccaactagaagtgtccaaaggcccccaaggctcagttcctcggcaagtcccaccttctcaggttttccagaattttgtttttaactgatttacactgagtgaagtagattaccaggagttttccattattttaacataaaatcgggggctaagtgttgttattttataaagacatctttgaatctctcaggaaatttacctcctgagggttcagataagatcctactctaggttaagattacatgtttggcgcaatgaactggtacaaatcttactttagctttcatgttatctatttttccgcactgacttccacctttttattagtcaagtatatgggatggaagagtgcttctaagaggtccttaacttgcccatttcaatggattttcaagaagacatgagaaaccactttgtttgcaaagcatcccaaagccatgtcctgctccagaaacgtgatctcatttcctggtcgtttcttaactgacacgctctaatcagtgcatctgggccaatttgaaatgaggtgaagaaatgtgtcctaaagtaaagctaacattgtaataggaattcgtgtttaaaaacatttagttttattattgggcaggatccatcaacatataacagttgaagtttctcaacaggagtttaataaatataaggaatgtacagaagtgtttcctaatttaaataaaatgtagtgattacctaggctgtgagtgcaatcttggtaatcttctatgtccatgcccatcactctgtgcaccgcaaactaattttgacctcagcagaaacgggattaattttcaaattagtaatttttttccaatttaatttatttagatgattatgaatgactattttagcagaaagagaatcaaggaaacttgaactaaataaccagaatttaaaatgacaaacaattcaacaagatgccaggatgtgagtggctccaggcccaattaattcaaaactttatgtgcccaggttctgtattttcccaaaattacacatctccattccagcttcatgccacagttgactcccaccgtgtaagacatggcgacaccattcccaaaggtcgtgtgcaattctgaaaatggaataagcaaggagaggagatgatagtttatattctcctctgaggaggaagaattgcctcaacagaccacttctcctgcatctgtgactagaactatgtcacaggcacacatggagcaaaatccctcaaggggataatacggtaacattaatcagggtgatcatttttaatactataaaattcatagatgacactgcattccagcctgagggacagagcaagaccctgtctctaagaaaaaaagaacaaatcaatagatactgataccaacattttagataatgaaattttcataatgtaattttaaatacactcacatcattacataaatcttcccagaaatattcctagtcatgttgagtttcatcaacttttccagtgttcaaatctagaaatccaatagactcttgaggataaatcaaaatgagggcagtgaaactggtatctgctcagcacctgttaactcaggaggactcaatacacccttgcacactgctgcttctctgaatggctcacaaggactccagctcactctccatcctcctcaaacatctggcccccacttgccctaagttgactctctgctcttagtctgtgctctgaagtcttcccagaggtgaaagtgagctgtcagatggaacttccctctcacctcagcgtggaatttactgctacatttaactatcactctttccataatggttgatttcttggtctgttcattacagatcaaaggcatctgatttgaatctttatttctttgcatttgtctccatgacaattttgggaggttttaccgccagcactatgacacgatgtagtaacatgacacatttgtggttaacaacacctacaaattcagaagctcttcggttgtcttcccagcaaatatagctgcttcttttctgtgtatgaacacatcctggaaacacgtacacacccacatagatatatacatgcctatgacattttcttctctgtaagtgaaaattaacctcaatttcatacgaagttcatcatttccctgaaggtgaaggtaggtcgtttttcatctgttctaacaaatgctcagacaccagctagtaagtgaggagctaccctgcttctggatgttggatctgtctcttcccctttgctttaccacagaagattggccacttgtccaggtcccaagaagagagtccaggtttgtcctgataatatgactcatccaacttctgataactctactgttacacacattcatggaggtagcctattaattacataattcactaaacaaataccaaatacccacattgcaataccccatacccaagggtatgttcatgcattcagtgaaggaaaaggcttttcagagacagatagatcaggctagattggtcaatatatgggtgaaaacactggacttgaatgtatctgttttcccccatgtcacatgtgagacctgtcagacaggaccagggttccttgtgcactcagaggtgagggctcacagaattcctctctggtttccaggaaaggtaactgcagtaatcttggtaatgagaatatcctccagtgctgacctattatagagtttacatatgaaattttcactgcaattcacaatctactctttcacacagaagtgtacagaggtcaggacacatcctcagggtcacacattgagaatgatgaagatatgtcccacgagtttttcctaaggtctcagaaagaattccaggactcaaaaggtctcagagggcagctcccagtgccttagttaaaatggtggctcaggcctgtaatcccagcattttgggaggccaaggcaggtggatcacctgaggtcgggacattgagactagcttggccaacatggtgaaaccttatctctactaaaaatataaaaattagacggggggggttgtgcatgcctgtactcccagctactcgggaggctgaggcaggagaatcacttgaacccaggaggcggaggttgcggtgagccgagatcaggacactgcactctagcctgggcaaaggagcaaaagttcatctaaaaaatttattttaatttaaaaatttttaaaaaatggcccactccctagaacagagagattccctctaaacatgatggaggtcccgaactatacattaagtgaatcctggtgtgtctgaactcacatgattattacgttaagctgctgttccaatctacttcctcacctgggaaaagaggagccagggcatggctagttgaggccccaggaagagaactgagttctcaaagggcaaagcaagcatcctcatcccagggtgagcctaaaagactggggcctccctcatcccttttcacctctttatacaaaggcaccacctacatgcaaatcctcactcaggcacccacaggaaaccaccacacatttccttaaattcagggtccagctcacatgggaaatactttctgagactcatggacctcctgcacaagaacatgaaacacctgtggttcttcctcctgctggtggcagctcccagatgtgagtgtctcaaggctgcagacatggggatatgggaggtgcctctgatcccagggctcactgtgggtctctctgttcacaggggtcctgtcccaggtgcagctgcaggagtcgggcccaggactggtgaagccttcggagaccctgtccctcacctgcactgtctctggtggctccatcagtagttactactggagctggatccggcagcccgccgggaagggactggagtggattgggcgtatctataccagtgggagcaccaactacaacccctccctcaagagtcgagtcaccatgtcagtagacacgtccaagaaccagttctccctgaagctgagctctgtgaccgccgcggacacggccgtgtattactgtgcgagagacacagtgaggggaggtgagtgtgagcccagacacaaacctccctgcagggaggcggaggggaccggcgcaggtgctgctcaagaccagcagggggcgcgcggggcccacagagcaagaggccgggtcaggagcaggtgcagggagggcggggcttcctcatcagctcagtgctctccctcctcgccaggacctcagctgtccccaggcctcctctttctttattatctgtggttctgcttcctcacatcctcgctgcaggcaagaaagaagggagaaatttctctgtttaccattaaggttttaacagtcactggcacctttttttcaacaaattcccacaaggcccattttaccttcttgacaaagtatttcaaggcttctcaccatctcttgattggcgtcatcggctgcatcgtgtcctgctcttaaattcatgtgatgaaaccccaatcccagtggctctgtatttggagagagggattttaagaaggcaaataagttaactgtggccataaatgtgggaccctaatccactaggactcttgtccttatgggaagtggaagacatcagaggcctctctctccacatgcacacagaggagaggccatgtggggacgcgctgcatgagaaggtggccctttgcaagcctggaagtggcctctcaaaaaactaaccctttcttcacccagatcttggacgtcaaggctccagaacaataagaaaattaatatttgttatttgaaacaacctagtctgtggtatcttctgatggaaagccaagcagattcacagatacaattgtgttagctccgtctcctggagggagaagcagcccaccgaggctgacacatctctcagattatttttataaagaaaaatagatccaagatgaaaaccccaccacatttctgctgagtcattcacttagcaggcttctctgagatcagccctggggggctgtgttctaggtcatgtctctcactttccactatgagaatccatgtagatcatgagaaccagccagatggagtcctgatcccggcccaccttctgctgctccccaagtatcccaaagaaaaccactccagcgtcacccctgtgtcttctactctctaaaatcccactaaagctgaccttaaaccaggagatatttggggccgggctcttgttctcttcttcttagtcttccataaggtccaggtgctgagtaaagcctcagtaaagattgagcttcagttcccctaacccacatcattcccttacatccttgtcatgcatctgtcctctgtgggcactcagggcaggttacacaggaattgcctgaagctggcctcaactgatgtgctgagaccacgggtcatgcacatgtatgattccgggtcatgcacatgtatgattccaggtcatgcaggctctactgcaggacagacctgtgtcctgtggggcacagacagctgctgaccccgggtctcctctaataactcacacacctggtgtttgtgtgtgtccagatggccccatgagcacagcacactagggtggccaaccttacaggtggggccgtcagatggaatggacaggctggtcactcccatcatcagtgatttcccagtgaattttaaataaattaaacaaaattaacaacaaaggggaaggatatgtacctgtctctgggaggtatacagggtcccagaactgtgctgggagtgggtgtgaaacgcccttttgtgtggaaagccctccagcatgagtgaaagctgaaggaatgatcactgtgcaggtggaggatgataggcagctggcagggtacatttcctgaagctgttcctgggtgcatgatggttggatggcccatggtgttgagggctggactcacataggaacaaggaaattatcccatgggaatggcagaaaagaaaatggagatggacacccctggagacagcttattagatttggtggaggaaaaatagaaatttattccaatgaccccagcattttcagctaaataagagttgcattaatagacagaattatgaaaggaagggagaaggagtttatggagggaaaaaaaaagaagataaattaaaatttaaaactatgcaaatctatcaattggcagataacagagtggagctgatgcagctacttccttgttctggaaacctgccagagacacttagcattcctgtaaggccagtctagtggtgatgaacttgtccactttttacttttttggggaacttctcaaacctcctgcattattgaagaaaagctttaatccatgtaacgtatttatttggaagtttcttggctttgtttttattttcagcaacttgaacagaatcatgcacatcatgatatttcggtgaacaacaggccacctacaggacaaaggtctcattagattataatactgtattttcaccgcatttttccatgcttagatatgttcatctgtataaacatctaccatggtgattcagctgcccacagtattcactacacttacatgacatacagatttgttacctaggagcactatgctatcccacgcagcctgggtgtagcaaggtatttcatgtaggtttgtgtaaacacactctatgatccttgcacaatgacaaattgcctaaggacacattgttcagatgtattcctactgtttttcatttttttttagatggagtctcactctgtcacccaggctggagtgcagtggcacaatcttggctcactgcaacctccgcctcccaggctcaagcgattctcctgcctcagccttccgagtagctgggattacaggcatgaaccaccacgcccagctaattctttttttctattttttagtagagatgggatttcaccatgttgccctggctggtcttgagctcgtgacctacatgatccacccactttgccctcccaaagtgctgggattacaagcgtgagccactgcgcctggccaatgtatccctactgttaagccacaaatcatcgtatctcatttctctcccttttttgtccctgttaatattttcatgttgtgcgtgcattcttctcctagctcagtgaacatatttataaggtttactttgaattttctgctaggtaatcaatgtatctccttttaatttgtgtcagtttctagtgctttttttgttaaataatttggaccacttttttctgttttgtgattattgttattattattattttttactttctctgttgctttctcctcattagaagaaaaagctaccgtaatcactcttcacagaatatgcccagggaaaatgccatcacctatcaacccaggctgtcattgtggcatctcttaaaacttcataatggttgaaattttttgttgttgttgttattagtggcactcagacctacagaggattttaagttttgctcctactctaaattaggtggcattgaaattcatcctgcaggcagtctctgataaagtggaggaattgggcagttttgttatgcatatggttcataaaaataatatgagtttaaggttttctcagccaagtgctatatcctgatattttataatcacttctttgaatctctcttgggtttatcttttgaaaatttagatcagaatataaaccaggtttgaggctttttgtttggtgtaaacatctcctataggtcattgcgtgaaaaggcacagagtctatctgaggaggagaactcagggaagcctcacaacaacaggggagacaaaaccgaggtcactaaaaaaatatgaagcttctggctcctgcagcctccagacatgccccacaccctctcattgcacagaaatgaattcctttctctttcctgagtgatctttgccaagattcctctcctccactttgacactttggtatatccatgtgtgtccattctggttcagccagggacacagaaccaggaagacatcgtggcttttctagagggagctggcttggggaatcaatggttggagtagaaagtgtctttgtccatgtgtcacagccctgagggacacgggaagaaggtcaggaagacaggatgaccagacggctggagcaaccagtatgaacaaagccactttctttcctggtgaagaggggcatttggaagcctggtgtccctgtaggggatgaaccacactcacctgcccactgttacttgccaacgaggtgacccgcagagcagcagatcctgagtcaccgacagtggctgcttcctcctccaaaccctccaagatctgtccttccaggagtgtgaacctcagcagatccgcacgttttcaatgggtccacttagctagtgtctgtcctcagccccatccctgggatcctgtcctggtgctgtgtacactgtcacaatagtggtgacagtgacagctggtgcctgcactttccaggccaagaagtttgaaagaagcaagtcacagggccagcctggatttggggcaaacacacaaatttcactctgtggggaagtgctgggaagcagccttgagtcctcctcagctcacgtgtggctgctgctgctcatcccaggtgggacacatgagccctccccatgcccaggatggagctgtttcagtcacagcaggatgggaatgtgtcttctctatgggggcttttgaagcacagctctcctgttcctgagatttgagatttataaagacaagtcccacagagtgaacctgcacaaataagacagtgcaggatccccaggagagacatcccatatgagaagggacaggcaggtcccatcactgacgctggtcctcagaaaccctgaccagctactgaccttcccaggtcccctgttcctggaacagttcgtgtgtctgctcctgaaaagatgcccatcaagagtccccagggttctgcccccttccttgatgtgcctctgggagtggggctggctgggctgtgggtctggcgtgaccctctccacaggtcagcggctcagtgcaggctgcaccgactcggtggggctgggctgtggctgaccctcccagggggagcctggactcttcttaggggtatctgcaggatcccaggttctgggagaacagggaagccacagtgtgtgcagggccccatctccagtaaagtgtttgctgtcgctctgttgacaagggcatatccccaggcctaggggcactgtgggcgcacgaccaatgcgcgagacacagggagtaaggcacagttccctcccattactgtgaggacactagacacagtgtgtgtgtgtgtgtgtgtgtgtgtgtgtgtgtgtgtgtgtgtgtgtccattactgtggggactctaaccaccgtgtgtgtgtgtgtgtgtgtgtgtgtgtgtgtgtgtgtattaggagttttgcagtggcctctgagacccatgatcttgcaggtttagaaattatctgatgagatgttcatccacaggaaccgacaagagattaggtgttctcccaaagcccctggaagctcctggactcactgtgagtgtggactgatccagtgcttccagagctccacagaaggggctccctggtggtttcatagaatccttgcttggggtgtttctgcagagttcactggctttcctacgaccaatttaccattgcaagcgatggcgtcagcagcacatggtgtcacgtgtcactaaaggagcattctgagccaggacacagccacttcatactggggggaaaatgctctgggagcccagacaggagcctctctgcagtgcaagggctgggctgcagggggcgctcaaggcccacccagcacaggctccagccccagagcaggtgcacaggaggctgcggatggagtccccttaagatctgtgtcattcttctaaaaaaatctaaaataagtatttgacaaaaactgctgaagagtccataaatatcctattcaactgcaagaatttatcaatttacactggagatttctaaccctgctacatatcttaatagtaagcatctggaggtcaattaagcttttattttatataaataagtgcaacttttggagaaacacactcatcccccaaataacacattcatgtattaaagcctagaaatattttaaattacctctgagctattcaagtgtgggttcccagtgaagtcctgttctagggaaaattgttctccagtgggagaagctctgtcaacatacagtttagggatatggcagggcacacatggcctctaaggggattatagcttgaacccttagcatcctcctgttgggtaatccatgtgtcatctctccactctttctcatgctgtgttaggtatgaaatagcatcgctcatgaatatgcaaataactgagatgactatagatatctttgtgccctgagagcatcacccaacaaccacatccctcctcagaagcccccagagcacaactcctcaccatggactggacctggaggatcctctttttggtggcagcagccacaggtaaggggctgccaaatcccagtgaggaggaagggatcgaagccagtcaagggggcttccatccactcctgtgtcttctctacaggtgtccactcccaggttcagctggtgcagtctggggctgaggtgaagaagcctggggcctcagtgaaggtttcctgcaaggcttctggatacaccttcactagctatgctatgcattgggtgcgccaggcccccggacaaaggcttgagtggatgggatggagcaacgctggcaatggtaacacaaaatattcacaggagttccagggcagagtcaccattaccagggacacatccgcgagcacagcctacatggagctgagcagcctgagatctgaggacatggctgtgtattactgtgcgagagacacagtgtgaaaacccacatcctgagagtgtcagaaaccccaggggggaagcagctgtgctggcatggaggaaatgacaaagattattagattgaagactttctcagaaaatgatattaagtcattaaggaaaaggaacaatataaacgtgtatttgagaaattttaattatttgagagatttttcatacaatatttattctgcaagcaaatttcagggattgaattaataaaactgatacagaacttcctctgtaggtatctgtgtaaacatcaatttctgaatcagtgttgtaaatattttggaacacacacacaaatcacattttatctctacttttatctctatttttaaaaatgccaaaaaaactcattttgtgcatgtagcattttgaattcccaccatcaatgcatgatagttcttggttttccacattcatattgccatttatcattatgagaattgtgtgttttaaccattctaataggtgagtaatggtatctaatttttagttaaatgcacatttccctaataaaaattcacatttaacaattttcatataatttttgccaagatgcctcttctcatatttggttcatttttaactgcattgttttcttttgattagttgtaagtttacttgcatattgattataaaatcatttaacaaattaaaagaattcatttaacaaatatgtgacttggaagtattttctccaagtctgcggctgtcttttactcccttatcagtatgtattgcagaaaagtgtgtgtgtgtgtgtgtgtgtgtgtttatacaaatttagatttaaaaaatgtaaaatgttattcatccacagatcatgtctttggtattatatctgaaatctcattataaaatacagtaatagcaattactttttccacgtctctaatctcaggctacaatcaactcatgagtgtttaagcttcacctacttgattagaggactatcaacctaacatatttggaatacttctgtaaaaagatgtgttcctcttcctattatttctttatttgatcacttattaatatgtgtattggtttatggatgtctatttcatactctgaagaagatccatgctacattattcattttatttttcaaaccaccacggctttattatgtgctgggagctcattgagtttggatcctgcatccttacagctcacctcatgcttttgtttttgaacacttccctgtttcctgctattataataaattctaaactcattttctatattatctttttcatacatagaatcagccatttttctaaagattgcttgcttctgatgttaaagaatagtatttaaaaaattgtaatactgggtatgtgcattgttaatgtggtataagtacttgcaggacctctcaaccaactggcctagtaaactatgtatctaaccttctgtaatgtgattacattaaaaatgagaacacactggtctctctacccaattatgctaccacatggatctttctagccttccttccttgactgtctataacctctcactgcaaaatgaggaaccccatccaaccatatgccattttattacttagctgcacaatttcaggacacatgcatagcagtatcagaaatgtaaagctgtacccttgtaggaaacatgtttatctactagaatagagtgcttatgttcagtttctttacactttaaacttacagagtttcctcattttcaaagttccttaggtcagcaacttcattttccactttcttcagtgaggtcatttcaatgacactgtataatttgatttatttgaaattctataaaagccaaaactgtagtcaagtgaacaacaacatatagaggatattcgaggagtttagagactggtataaaataagttaaaaagacactgtttaagaagattaaaattatttttagtgatatgcaatggttcagatatgacacaattaatttgtctaagcacatagttttgtgatggaaaatataaacctaaatatatacaattaaaaaaaaatttagcagttcattaacccaaggatcaaatgcagattgtataaaattatctcattacttattttgtgagggtggagatttcatgagatgtatgcaacaaagaatgaggtaattttcctgatttgcatataagatgttgccattcactaaagacctttaattttttaaattgttttttttttaaatcaattttctatgtgacccaggtttttttctcttgacaagcaaataacccacaggattattttctttccttggttgagaaatatttccccaaacttcagctcagttcaggcatacactgtccctgaatgggcatttaccctcagatgggtacacacacctgtcaacatgtggactcttctgtcagacaaacgcacctttactcacgtggattcttctctcagacaaacacacatgtccccacgtggactctttcctcagactaccacatatgttcttacatttactctttcctcagaaaacagacatttcctcatgtggactcttgtctcagacaagcaaacatgtctccatgtgaactcttcactcacataagtacacatatgtccacattgactgtttccttacacaagtacatatatccaatgtcgaattgttctgtggcaaaatgatctcaagataatgataatcataaaccccctccctgacaaggcatagatctgtatttttttcattgcaacctaactttgccttattgtcaagaacagtagtttgcagctctaaatataccaattagagacaggtgtccattttctctggaaacgtatttttatgttcttactggacatatttgttgataatgtttgctattatgaagataccccaacagtgtccacattagagaataaaaaatagtaatgggcagattaactctgtgcatccagacccagaaatcctttgaccttgacttccctgaaatgtagacacagaggatggatgagcaatgctgagcagtgcacccatgaccacaaaaagaaagacgtggaaatgtgtcccctccacttctcatgaaaggcagctcatcccctgttccctcaggccctggcgaggagccaccccatgtctgtgcccttcctcagtgtccacaccgtggggtctgcattgatctggattctcttctcatccccgtcaatattagtgtccttcgtaaatcaggtccagctgtggcttctcctcacggggctgttctcagtctgtttgctgtgttcacggaagtcctgtgtgaagtttactgatggagtcagagggggaaaaaatttacagcccagtggtgagactctcctgcaaagcctctggtttcacctttactggttacagcatgagcttggtccagcacgcttcacaacagggataggtgtgggtgccaacagtgagtgatcaagtatgaattctcagggttactttccatgagtacaaataaattaacaatctcaagcaacacccttttaagtgcagtctgccttacaatgaccaatctgaaagccaaggacaaggtcatgtattactgtgagtgacacagtgagggaaaccctgtgtgagcccagacacaaagctcaccgcagggagacaggaggggactatgtggtagatgctgctcagaaccaccagggggcatcaggaccatcagggagggtgcacagaaccaccaggaggggctcaggacaccagggggcgctcagaaccaccagggggccctcaggacaccagagggtgctcagaaccaccaggaggcgctcaggacaccagggggcgctcagaacactaggaggtgctatgaatcactagggggcgctcaggacacaagggagcactcagaaccaccagggatagctcaggataccagggggcactcggaaccgccagggggcgctcaggacactagggggcgctcagaaccaccagggggcactcaggaccatcagggagggtgcacagaaccaccaggaggggctcaggacaccagggggcgctcaggaccacaagggggccctcaggacaccagggggcactcggaaccaccagggggcactcagaaccatcagggagggtgcacagaaccaccaggaggggctcaggaccaccaggaggtgctcaggacaccagggggcgctcagaacactaggaggtgctatgaatcactagggggcgctcaggacacaagggagcactcagaaccaccagggatagctcaggacaccagggggcactcggaaccgccagggggcgctcaggacactagggggcgctcagaaccaccaggaggcactcaggaccatcagggagggtgcacagaaccaccaggaggtgctcaggacaccagggggcgctcagaacactaggaggtgctatgaatcactagggggcgctcaggacacaagggagcactcagaaccaccagggatagctcaggataccagggggcactcggaaccgccagggggcgctcaggacactagggggcgctcagaaccaccagggggcactcaggaccatcagggagggtgcacagaaccaccaggaggggctcaggacaccagggggcgctcaggaccacaagggggccctcaggacaccagggggcactcggaaccaccagggggcactcagaaccatcagggagggtgcacagaaccaccaggaggggctcaggaccaccaggaggtgctcaggacaccagggggcgctcagaacactaggaggtgctatgaatcactagggggcgctcaggacacaagggagcactcagaaccaccagggatagctcaggacaccagggggcactcggaaccgccagggggcactcaggacactagggggcactcagaaccgccaaggggcgctcagaagaagcagggggtgctcagaacaccagagggtgctcagaagcaccagggggcgctcaggacaccaaagggcactcatgagactgtggcaagggggtgctgagaaccacaggatgtgaccaagacaccaaggggcactcagaactgccagggggtgctcaggacaccagaggattctcagaaccaccaggggatgctcaggaaactagcgggtgctcagaaccaccggaggacactcagaaaaccaggggatgctcaggaaccaccagggggcgcccacgacaccagagggcagtcagaaccaccggggcatgctcagaaccaccagggggcgctcaggacaccaggggatgctcaggacactaggggcgctcaggaaccaccaggggacgctcaggacactagtagggtctcagaaccaccaggggatgctcaggacactagggggcgctcaggaaccaccaggggtcacccaggacaccaggggtcgctcaggaaaccagagggtgcccaggaaaccaggggaggttcaggaaccaccagggggcactgaggacaccaaggggtgctcagaaccaccagggggcgctcaggaaccaccagggggcgctcaggacactagtaggcactgaggaaccaccagggggcgctcaggacactagtaggcactgaggaaccaccagggggggctcaggacactagtaggcactgaggaaccaccagggggcgctcaggacactagtaggcactgaggaaccaccagggggggctcaggacaccagaggtcgctcagaaaaccagggggtgctcagaaccaccagggggcactcaggaaccaccagtgggtgttcaggacagcaagaatggctcaggacaccagggagcactcaggacctccaaggggctctttggaggcagctccatatcaggtacctggggaggatgaggtttccttttccaccttggtgattcctgacctggtcaagcaaaagtcttccccaggatctcttacgatgtcttccttgtaactcatggtttctttcacctataaaacattaacttagaacaggggttcaattcaacttttaactctgcctattttcagagttatactagcaatgatatatctcagtatattttttttaattgtgtatattcaatccaaagtctggctctatgcacaatttttttgttttctgtgctgtcagacacactattgtaaatgcttttctaacaactcagcatatgcatggggtccagtttcttttcctttcatcggctgtttgtgcagatgaaacaccactttaagggctcctgtcctccactttggcccctggtgttctgcttctcaaactttctccatcttctctttttctgtcaaaatattttatcttcctcagtctccatgcaggaaacaggaagtccttttacttcctgtcctccatgtctggtaaatcagttcacttcttttcatgatcactgaagccaaccaagtttaggagagtaacagttctccttagaatacactctacctgcagaccctctgccctcatcacacttttctagggtcctgcagacataacccccacccattcctctttttccctaagtaccacagactaggctctgcaacttatgctaccctctgtgtgctcagcccaggggctcagtagtgctttcatgaagtccaaatccctaatgtgtttgcccactctcagaccaccctccagcaagctgccattgtgattgaatcctgcaaagcatgggctgctttcagtttcctattgctggatgttctttattataaaggcatattggcaaataacgactagagtttgtattgaaaattaacgccaaaaagttttttaaaaagtttttcaaatagaaaagttctatcctgcctagtttaaaaaaatacaatgttactttaatcaatgatttaataaaaatttaagtgatgtttgtcttattagttattcaatttattaataactgactgatatttaaaaagtaaatactggctgggcgcagtggctcacgcctgtaatctcagcactttgggagggtgaggtgggtggatcacctgaggtcgggaattcgagaccagcctgaccaacatggagaaaccccctctctactaaaaatacaaaattagctgggcgtggcggggaagctgaggcaggagaatcgcttgaacctgggaggcggaggttgcggtgagccgagaacacgccattgcactccagcctgggcgacaagaccaaaactctgtctcaaaaaaaaaaaaaagtaaataccattgtacacttaagtaatatatttggcaagaatggcatttacattcattcaaaaatgaaactgcaaatacgagttacattcaattaaataattaaaataatatagaaaaaaatgggtgtgttgttttggtgtttaatatacattcatttttgcatggacgggtatatgtgtcattgctgggctgttgtgtatgtgtgcgtgtgtgtgtgtgtctgtgtgtacaactatgaagtttaaaatatattattaaattacgtagttatattaatccaaatttatcatgttaaaatattaggaaaaaaacaccagtagagaaattacagagaacatcagcaatgcctacagcatttacaagagtcacattaataacaaacaaactagttcaaatgtttagatatgacacatgcagtagaaaacgttcacatggtattaacacaaaaatggtgcacaactgaggaaattataatacgttcatgatattggctacataaatgcttatgatagtaatgcttttcatccatcaaatgcttatgataatgcttttcatccatcatattatagatgataaaacaactctataaacacttccatcactagcgtttaatatgagatgcctcacatctttttctgaaataaataaacatctgtccaccacttcgatgatcatttcaggattatcctctgaaataattatccataataattttagtaacaatattattttcagaagcctattttataaggtctttgaactattatttttatgattgttactttatattttacacactttttatttggaataattataggttatcagaacaattgtaaggaaaatacagtgtgttcacatccatctccaagttttcactaaagttaatatgtcaaaaaaaacatgggacatgggactaatatatttacattgataagtttctgtttattcagctctgggatttatttgaattttgccaatttttaacagtttccttttttcctttttcttttctttttgagataaggtgtcactttcctattgctttttgtttgtttctttgttcaacccacgtaaccacatcaaattcagtcaccatgttcctctcatatcttctggttaatcacagtttgggttcctgctgtcttcccattgaatattctataaatgaaactagtcaaataagttgattctggtcacttatatatttacctattttatcacgtttgttttgtcaatcacagtaagtgtcgaattcgctatctgttatagatgttagcctattttctatcccagatccattggttaaatctttggtgatgccttttagaaaactgatccctttaccctatgtaatatgccccttgattcctgaaagtcttatgtctaccttgtctgaatttaacatagctaagcacgctttcttttcgttcatattttcatggtccatgttttcctgtatttaacttttctatgtagagcaaatttctgtacagagctagtagttgggtcttgctttttaaatcaactataataattctattttaaaactggtattactatttttctgttaatttctgttttaatttggcattttatgatcatgtttatttctctattaacttattgtttagttcatcttttatgaatattgtattggccctaagatatacaataagaattgtgtataatcagattctaattcaaataacgtaaaacctcttcataggttgtagagctattataacttattcttctaaacactctttctcatccgttgtcttagtttattctcagtttgcacttatatgtgctataaaatataatatgtgcatttttatcattacatagacatatattagaacaattaaaaatataaaaactacatttcaacttcattttttcattcttgaccacatgttttatttggatagattcatgtttcggatgtatatcatatggctactcaccctggcagaaaatttgccaaagcacctactgaaggatgaatgcactagcaataaattttctcagaatcgatttgtcttacagggtattcatttgactttcgctttaaatgaaatttttaatatatatagaattccagtttgactttaatttgtaatttattttcttgtactcatgtattcattattttcttcctgaagatggtcacacattccattctgctgggccttcattatagatatttgtgtgtatctattcagggctatatttgcaatttatggatgccacaattatcagagttgaagtcagcttctgctgtccacagagatttcaagttcctcccatgatacttgcttttgtgtccctgtttgatcctgggtctttatatttagttttccccagggaggctgtctgtttcagctgtggaaagtgcaccctactgacagtttaaattgatgactgtgtggtgaaggaggttggacaaagcgggacttcctccaaccttctgactgagtctccttcttatgcaggagtagtaagcatagttctggggagtggccttccacattgtcctgtccttaactctttccccagggctggaacgtcttttcccagacacaactgtttttcaccagtgtccccagctttttacccactatccttaccctaaagagtaaggatttctttcctgaggaaggagatgggaggtgtttctggatcaagtttccttggtgtcgtctgtttccttttgtttctgttgacttcaccacagctcatatgacacatgctttggtggatttcccctggaggtagtggaggtgcattcaggcattccacaggagctgctgttcttttccccagtcaacaccacaagacaccagatgaggaagttgtccgtggatttttcaagttctctaggaaaagcttgcaagcactaggccaatctaacaccattagtacatgcatactaaaaaaaaaaaagtcattaagtatttctaggttagtctgtttctatctcaaatgccatccagtggcacctgccctacgtacactagcaggtaggtcctggttctctctgcaggctcctatcttctcagatttcagttttcttgtttgcttggtgaaatcaactcagatatgttgaatgttttttctctcttttatttgtagctgttcagcttcgttgttaatgaggtcagaataaaatcacagttttctcatttttttcacattcccacactgaatagctgctttccgtataaaagccagaaactgagagaacacattgaatatccattacaggtgaatgttaaacaatttgagatatgtttgtgtactggaataaaatgctgcattacaatcaagtcatcactcattcacataaaacatggccacattctcaaataatgtagggacctgagtgcccctccatctactggcctctcctggggccctagcctggccacaccttcttgcagggcagtcttggacgccctgggatcccgcaccaaaatttctgccctggcagaacatgcctgactggtggagagctccaatcgggcagccctcatgtgcacacaccagcttacacacttcctccgaatactgtaggttcacccaggcccacgtaacttcccacatcactttgcagtcacatgtctgtataggtgggttttgcttttcttgtcccaccattgcgtggagtgcagtcccctccccccaccccaaccaccatggcagaggaagctttggtggggaaaaagccagggccgctcctgtcagcgtcccgcacttgcgctaattctgcacagagaatagcagatcatctcacacattcagaaatcactcctgcttgtggggcatgaatacggcacccgggcctgtgcccacaagtgtcccatccctgagccaacacctcctccagtgtgaccttgaacacagtcaccaacagggccccacagacgcaatgcctctgccactgtggcgaacacctgcagggaggcaggcacccagacacccactagcactctgccacagctgccacacctccaacagcccaggacagtggattcctaaccttaaggagccggagaaccaagtcagggactagtataacttcccccagagtcagagcacacagtctaggtgttgggagctgagcactggccacctaaatttttccagaaatgaagccagttggctgaatccaccttataccacaatcaaaccctcaaggtcatccaatagggtaaaagaaaataaaaatgtatccaaaggtcagcaacttcaaagattgaaggtggataagcccacaaagatgagaaagaaccagtgcaaaagtcctgaaaacaaaaagggcgccctctttcctccaaacaaccacagcacctcttcaacagcagttctgaatggggctgagatggctgaaatgacagaaacagaactcagaatatggagagtgaaaatgtagatgaatacagctatttatggagaatactataaatgttcctcaaaaaataaagaaacaaaatctactgtagaatccagcagtctcactgctggctatgtatccaaaggaaatgaaatcaacatgtcaaagagatatctgcactccatgttcacgttcattgcagcattatttaaaatagtaaagatatggaaacatcctaaattcccatgaatggatgaatgaataaagaaaatgcatacagacacaacagagtaatgttcatccttaaataagaaggaaaccctgcctctgtgacagcatgcatgaatctagaggaccttatgccaagtgaaacaagccaggaacagaggaagagtcattcatgatttcactgtatatattaaagcagtagacttgcagaggtagagtagaatgttggttaccagggcctagaggggtggactgggaaagggagatgtgggttaaagtgcacaacgttccagttagaccggaggtataagttatgcctttctaatgcacagcatgtcaactatagctgataaggtagtatatatttcaaaattactaaaaaaataaacattagaatttccccactaagaaatgataaatttgtgaggtgatgaatataagcggcttgagttacccagttcataatgtatacatgtatcataactaaacaacatatgtcataaatatatgcaaaaattatttgtaatttataataaaataagtttcatatttaaataattacattaagaaaatgaacagaaactttcagatttcaagaatattttatatatatatatatatatcttaaaacaaacttgcaacagaatatagaaataagttttacgactcaatggaaaagaacagaattcaataaaaactggctaaaagaaacaacagctgcatcattatagaaaattctggaataatcagccatataaagattctcactctcttagaactagaattccgtaggacttgtaattcctcctgacctgggtgggaggcaaaaggaagaacagctaatggtgattcagtgagttttatacctgtgtgtacttctgtgctcactcagcagaaagaaaagaagaaaagaaagaaagagagaaagaaagaaacagaaagaaagaaagaaagaagaaagaaagaaagaaagaaagaaagaaagaaagaaagaaagaaagaaagagaaagaaagaagaaggaagaaggaaggaaagaaaagaaagaaagaaagagagagagggagagagggaaggaagggacagcagaagtcattgtggtgtgtgtgaaagcacaatccttgggctcccccacatccatctctactccagtcccatcaatgtccagcaaatacattttctaagatgaagtattttaaactttctaaatcctgctagaaaacccctcagctctttcagttttgctctatcacttgaattattgaattaaatctagtttttgtgggcctatcaataccataagccaaaataacacatgaagaaattgcactgagacacatgaaaaccttctgaaagctccataatttcagatctgcattcttatttccccgaacctaaatcactgaatagagactcagaacgagttgatcttgttcctgaacgtgcacagagccaaggacatcctgtctgtctggaacagctcaggtttgttcctgtttctcctagaggatataaaatcttgagttagggaaaaacagccagggacaccctgggctttgttcttctctcccctggaggcaggatgtccttcagagctttgtcccagtgggtaacacagctgctgaggtgtacaacccacgtggcctcgttttggtcacttttgcatggtgagcctgctttgcaccatggcctacaatatgcgtgtgtaactaatctgtctccatcttcaaaatgacattattccacatcaaatctagtgcaggtgcctcacacagaacattctcaattacctccatcattcataaaattgatgccattaatttcaagtatacatacatcagactcatttaacgtattgttattctcattgtttgaaacataacttttagatcaaataattaacaataataaaaatataaattttgaagtcaggtaatgtgatttctctagttgtgttctctttgctcagaatggcttgggctgttctgcatcttttgtttttccacatatattttaggattttttaaaaatttctgtgaagaatatcattgttgttttcatagggattgtactgagtctgtagattgctttaagtattatggacattttaacaatattgaatctttgaattcataaacatggaatattgttccatcttgtgtcctctttatttcctcaatgttttatagatttattgtagtttttttttactttgttcattacacattgtatgcctgtaccaaaacatcacatatacccaacaaatagaaatatatatactattatgtgcttataacaattaaaaattatgtatgtatattgaatctattcaaaatcagaaactatttctttttactgtttgtaaggtcttgtctctaggctataaaaagaatttgtaaaactcaacagaaagcataatataaacagaattctaaaatgagtgaaaatctgaacaaacacctcaccaagaaaaaatgttatctgaaaataagaatatataaaattgttcagtatcaattgtcataaactgatactcatatttaccaaatacaaaagtaaacatgatgtatttcaacagaattgattctcaaatatttgtatactcatacagtggaatactatcagtcataaaaactatgggttattaattcagaagacaacattttaacattttttctaagtgaaggaagatggacaaaagagactaagtattgtacaattccattcatgagacctgctaaatacagtaaaattaaaaggattttaaaaacaggtttgtgataggcagggcttttggggaaagacaagagactgacttggcaaagctcaggggatatttttagggtaaaacaaactgtgtgccattgtgatatgcctaatttcttattatatttgttcagagttaatagtgtacgtttcaaccaactcggtgattttatattttctatttgctgatagagacatgttcatttttgtcaatcactttgctaaatgtggctgagaggctgttgaaatgaacgctgagcaaatgtattcaccaaatctacaagagcaaattatttgccaattgctgattgagtggggtctataatgtatttgagattgggtgtggggatgttattgtgtgagatcatgatgtttagaccatgacactctctggtgagggatcactcattcattgcacatttaatgaaaggcaggtaggaggagcagaaggggatgagtcacactcctgaccacagccacaggttattgaaggcagaactgatgtaatcccctaaggtagaccactgcccctccaaggtgaccttatcctagagttgacacacatcctgggacaccagagacaactccttctctcccctttctctgcacttcagctggaagcaactgtctcaccgagcaccttgtgttaaggaatgagagttcctgttccaggtgtgagggcccaggtgcatccacttgatccagcacaagagcaagaacagccttccagaaaatgacatcgcctgaggtataaccagctctcacctgctgcagcttcctctgaataaaaaggaaactgttgaaacttcctcataagtgtcctgctgtgccattccctttgtccccacatgttcagttgtgtctgtccagatgtcacttttgtgtagggagattagggttctgcttccagtaccagaacacacatgacctcttaggggacttcagggttttgctgacatatgtgatgatcttaaaagtcattagctccatttctacatcaaaaaacatctgaaccaaaggagcacataggctcaggcctgtaatcccagcactttgggaagccaaggcagaggaatcacttgaggtcaggaatttgagaccagcctggtgaacatggtgaaaccccgtctctactaaaaaatatatacaaaaattagccaggcgtggtggcactagcctgtaatcccagctacttgaaaggctgaggcaggagaattgcttgaacccaggaggtggagattgaagtgagctgagatcgcaccacttcactccagcctgggcgacagagtgagcctccatctaaaaaaaaaaaaaatttatatatatatatatatatatatatatataataaatatatattatatatcatatatatattttatataatatatatgtatatttttatatattatacatacatatcaatatatgatatataatatgtatatataatatataatatgtatattcatatattatataatatgtatattgatatatattacacatatatattttgatatatatatatctccaaaccatctaaatatcaagtattttttaatccatctaagagctgaaattgctgaaaaaactactccctccaaaagctgtagagacaggcacatccacagtcacagcagagacttgctgacttggaagagaagctcctggagacacattggtgagaacatttacctggtgattatgctgaatgtctggaggacaaatgtggactagggggagggtgagcactcctagaggctgtacaccccacacttgtgtggacttgccctccagggccttcaggttctcgtggaagcaattaaaatagattccctatagccatgaactggggaggagtaatcacggagaaaagatgcacaaaaagacttttctagaaagctcatccaagggaaggtattctccaaaatcttagtttatgtgggggaaggaaatacttccaaattacagacccctcctcctcagccttcctctatcacgcaaatgataaaattagccaagaggagtcagattcaaggcggtagccctgggtgcagcatctgcagaagggaggaaagagagaaaatcagctgtatcactggagattccttgtgaaggtcactgctcaggagaagagggcaaccaaaccagggagagtcaactgtaagaacataccatgctcccctgccccacacattacctcctcaacagcatcattaatatggattaaagagggcagtgtgattgctttagatctgtttgagaaagaaagtcacatactgaggcctagggtcagggtcggcggcacttcccgtgagtaagatactacgaagaaggaaaaattaggggtccataactgtgaaaatcagccacagtgtgtgtgagaatgtttgtgtttgtgtttctgtgtgtttgagtaggagttattggaacagcggacgtggagtgagctttaatccacatccatctgcagcttcaggtattctcagatgcagtattcatctgcaagagccgaaatgagaaaagagccacctccaacccccccagagttttagcctccctttgtttccagtgatccagtgcatctagacctccaggaagtggactccctggtgattttagcgattcttctcttggagccaccctgaagaggacattgggtttccaaaggcccattcactatttcaagaagtggtgccatcagctcatgttgtcactgaaggagcattctgagccagggcacagtcacttcctagtgagctacagaggctgagagaaaaatgctctgtgagacccaatgggaagctccctgcagtgcaaggtctgggtggcagggagcgctagggcctcgcccagcacaggctgcagccctggagcaggtgcaagggaggctggggaggggttcctcccagggtctgatgtcttccttttctcggacaaacatgctttaataagttaaacaagactttagtaaagactattgatgtgtctttgtgtctttcagtatacagttctatttgtaggatttatctaacctaacaagtcaatgagaatcacatgtaaaaggagaaatttctaggattttcagatatcttaataggtaggagatggagaaaagggatggttttattaattcagtgcttgccaatcttaacagagacagtagtaagacatgcagaaagcaaagcccagaaaagtatgaaggtgtcaaagtgccatttaagtatgggttcacttggaggaccatgttctgcgggaacttgttttcagcagacaatctattttagcagagttctgggcatacaaggggacacacatcattaaacaaggattgggacagggacttcagcgtcccactgttgcatggcccataaattatgtgtgttctctttctcatcttggatcaagtctagagctatgaaatagtatccctcatgaatatgcaaataacctgagatttactgaagtaaatacagatctgtcctgtgccctgagagcatcacccagcaaccacatctgtcctctagagaatcccctgagagctccgttcctcaccatggactggacctggaggatcctcttcttggtggcagcagccacaggtaagaggctccctagtcccagtgatgagaaagagattgagtccagtccagggagatctcatccacttctgtgttctctccacaggagcccactcccaggtgcagctggtgcagtctggggctgaggtgaagaagcctggggcctcagtgaaggtctcctgcaaggcttctggatacaccttcaccggctactatatgcactgggtgcgacaggcccctggacaagggcttgagtggatgggatggatcaaccctaacagtggtggcacaaactatgcacagaagtttcagggcagggtcaccatgaccagggacacgtccatcagcacagcctacatggagctgagcaggctgagatctgacgacacggccgtgtattactgtgcgagagacacagtgtgaaaacccacatcctgagggtgtcagaaacccaagggaggaggcagctgtgctggggctgagaaatgaaagggattattatttttaatgttgtttacagtatgtcattaataaattgaaaaaaagtaacaatagaagtatatactctaattatatgggaactttgttttttcagttttttcatttttttttttttttttggtttgtttgtgacagagtctcactctgccacccaggctggagtgtaacggcacaatctcagctcactacaacctccacctcccaggttcaagcaattctcctgcctcggcctccagagtagttgggattacaggcacccgccaccatgcccggtgaatttttgtatttttagtagagacggggtttcaccatgttagctaggctggtctcaaactgctgatctcaggtgatctaccctcctcagcctcccaaagtcctgggattacaggcgtgagccactgcgcctggcccaattatatgggaattgtttatataattatcaccctataagcaaaattcatggaggaggaaaagctctactgaagaaagctgataccggcattcccatgaaagtatctgtgtagaagtaagtattaaaatcagttgaataggcaaggcatggtggctcacgcctataatcccagcactttgggagaccgaggcaggtggatcacaaggtaaggagttcaagatcagcctgcccaagatggtgaaaccccttctctactaaaaatacaaagaattagctgggcgtggtggtgggtgcctgtaatcgcagctattcgggaggctgaggcagagaattgcttgaacctgggaggtgaaggttgcagtgagccgagatcacgccactgcactccagcctgggcgacagagtgaaactccatctcaaaacaaaacaaaacaaaacaaaacaaaaaaacagttgaataaagtaccttagagtcatctgttcaattaacatgtttaactccaaagaaatactgaaaatattttccaaaaaggaagtgccattttacgttcctaccaacagtgaataagattttcttttctggagccttgtcagtattcactaatgctttgctgtgcagccgttgtaatattatagtaaatgagtagcagtatttaatggttgttttaaatatacatattcttaatacaaagtcttgatgaacacttttttatacattgttttatgaggtgtgtgttcagatctatgtatgccagaaatgcctggcagcgttaatttaagcacactgtgagaatgaccctatagtttatgaagaatgtatgttcagagctctgagctaagaaatccaggagctgtcaacccagaagtttattccttgtctgtgaaggacatctgaatccctggcctatcccttggaacacaggatgtccaggtgattgatgctctttgttaaatctggaggttgctaggtagagggtgctaagtgaaaatcataatataaactacacgtgttttacaaatggtagtggttttcctgtccaacacacttttcctgggccacattgtatgcaagtcctcaatacaccctaggtcttgttcatgggctccaggtctcctcttcagccttttggacatggtgccatgcctattacagtcaataggggtctagcatgacaactggtaggcccagaacaaggtcaaagaaaatcctgcaagctcttagacaacagtgtcaaggaaggggagacctgtggggaaatcccaggcaggccatgcacatctctgtgggcccaacagctgcaatccttgatggatggggcccgctgcatgtgtacggggatgcctccaaaatgccaaaagttctggaggacctgttgcctgaggtggatgtgacaatgtgacaaagtgacagtcagattcctgagctgtggcagctgttggccactcctgactgcactctgagcaaccactgaggcagagctcattgcacaggctagggtgtgtcagccacgagaacagttgtaactataatgagatgccgcctgtagggataggatagcaaattggagaccattgtttatttggtaggccatttaaagtgttgctgactgccacaccaatgcattaggactactatgactacgtcatcctgggagcctaagtcctggcgtccgatgtagagctccagtgggaaggagatgaaggttaggatgagtccataaaggttcttgctctgcagcccctgctttgctgtctcacttggtgaacagagaatgggaggtcaatgcggacaaagtccagggtccaggcttatcagtcaaatacttggtgtcatctggttacataagactatagttattccatatttcatcatagataagataagatgcaggtctactcatgtcccaccacaccaaagcagttggaaacctcccaaggcctcctgggacattggcgatcctttattccccatttcggcaaaccccttgggcccccatggcacttagacaagaaggtgccccactgcgactgttccaaaagggaggatgagggctctgaagaagctgaagtcacagtgaaatgaatacaaaccttgggagttctagtgcagggacagccctgtgaattggatgtagtcagttaccctgaggggtttaggtggggactgtgttaaaggcaaggacataagtgtgtgtccctaagaccctggtctcaaagacagaaggaagctgaagtgagatatactgtttaggagtagcaactgcactacatgtcatgccttacgagtgtaggatgtgacaaagagggccactccacatccggaacaacctttagcaggctggctaaaggatgccttccagacacaaaagccttggaatgccaggacacagtctgtagccaaatggtacttgtggtggtcaccaccaacataaaagtgggccaactgtgccagcagaagttagccccacagaactttcccccacctaagagaaggcagtgcaccacaatgcggaattccaccactgtggaattgggggagcttagaattggattcagacacaaggggagagagtggatcacagggtggcttctctatgggatagggggtggagagtattatactctctggactcaagatgagtaaaatgacacccatcacaaaccatccagccctatgatggcacctttatggtaagtggttgcaggctccaagggggccgggtccaatgaggaagatgcccccacagctcgttctcaatggcagactatagaagagttgcaggatatcttctgggagtcgagatgaggcatgctaattatgctgagaattattgaagtcccaacaatgaattgtttactgcaaaataaaagctacagttatgtattcagtgcctacccaatggcatggtgcactgatttccacgttaagccccctgggagggcagccaacatttcatgtgccccaggtagttgctgacttaggagaaaagaagaaactgagtaagcaagggatgcaccctactgtgatgaagaacaatggcaccaaaggaagagagacagccaaggagccagtcagggtggccagacaacgaatgtgctctaactggcaacacctaccagttctctgggcccatagcggcaataggtggttatggaagggccacggaagtcagaccggttgaactagtgatacgacctgggggactgccacccagaccctgtgtagtatacacagcttccatcctagaacacatgagaatggatatcttcttaggcgtgaccctccaaacaacggccagggaattccaacggagagttagagtggtgatatgtgtgaccaagcagaaggcaaactggatgccagtagagctgccaacccatggggagtcccacagctggagcaacaccacccgccctgggaggggaagatgatccaatcatgaagattgttaaggagctagcccaggtaggcattaggaggccactgcatggttcctacaacagacctgcatggcccatgcagaggccagttgagacatggagaatgacagtagattactgggagttaaataaggtggtctcccgagtgaatgcagctgttcctaatatctcctccagtctgacgagaataggagaggtgttagccacgtagcatttccttatcagtttagtcaataccttcttcagcatttctgttgccccagagtcaagatcaatttgcattaacctaaaaagaacaatggacttttactgtcttgttccagggatatttacacagcccaaatctcacagcctagtgacctccaacctcagtcgatgggctgacccaaaggggatacatgttttccactacattggtgttatcatgataacctctgagtcttttttcagcttataaattacagcccctgtcttgctgtctcacttgctgaatagaggatgggaggttaatacagacaaaatccagggtccaggcttatcagtcaaatagttggtgtcatctggttgggtaaaactaaagtcattccatctgccatcatagataaggtgcaggcctacccacgtcccaccacaacaaagcagctgcaaactctcaaggccttctggagcatcagtgtccttttattccttttatttgacatccctgaaggaggctgctaggggagactgtgtccctcctaaattcatgtgctgaagtcccaacccttggtccttcagaatgaaatcatacttggattagtgtcctttaaagaggtgaataagttaaagtgagattcctggagtggggccctaatgcaatctgactgttgttataagaagaggaagcaggagggagggtgcacaggccccgagggacggccatgttaccacagaacagtgagaaggcgccatctgcatgccagggagcgagacctcagaggaaacccacccagctggcagcttgatcttaggctttcatcctccataagtgtgaggaaattggttttgtattgtaagccatccgatctgtggtatttcgttataaaagccctataaaatgaatacagtaggtaataggagagcttctatacattgaaaaagtcggatggccagaaaaacctagacactcctgttcagacctgagcagggtgatggacctgctttgggacaggagaggggaagagatgaacccagcacccagacccagctgagcccattcctcagcaggccgtccctgggccggagcttgcacaggtgtgaaagagcctgtcttggtcttcaggggctcatggagttggacggagaatggtgtagactcaagaacacgtcatcggtgtgcccgtgtttatctgaatgggatgtgtttctagggtgtgctcatccccaaagaagaattaatcaggtctcttgggctaaaaagaggttgtggcatttgtgtgtattaataactgtggtcggacagtaaattatgttaaactgcttatgggaaggcacaatggaaagaaacactttgttacagaaggaaaaaaaaggtgattatttaaatgaggtgcctttgaaggtcaccatgccaagaggagcccatcacatgatagtgctggctttcatgttcaggagatcaggagggtccgtccgctggcttttatgacaccctagacagagctgagagtgtaatgtatgaatggaggggaagtggagagaggggaggccaaatgtttggtgggaatggagggtcactattggagccattaggaaatacacaagcatgaattatgctggaggacagaacagtgttcctggggaatattgtgttgctttgggagctgctgaacatacaggagtttcactgttcctagttctcaaattctctagactctctggacaacccagttttaaatattgggaatataggtaagacacattcgttattaaaaattattaagagaagatgtaggaagaaatttaaagtaatccatttggttatgaaaatttagttacagcgaactgtgatgtccgtttcttacttggaataatggaatgtaagtcattagtcatctcaacggttcatttttccataaccatcaattacaaaactgctgagtaatttcctgaattgcccaccatagaaactgacctcacatttcctcaatgagaaactgccagtcccgttgatccagcctcgttcttcccatcagggattttgtatctctgtggacgtgtggcacagtgctgcatatccatcggcatatggcctcaggaaaggcgccagcctatccatgcatgatgaagcttacttaggggatgaagcccgcatgctgggtgagccagtgccaacagctgaaagaatcaactgcctggtgtatgatgcttttatgaaaacaagcccagggcctcttgcattcttctgtattagattctctggtgaagatttttattcatttctgcctgaaattgccacatataattacctggaagcattacaataaactgatttggaagttaactgacttcctggtgaggttaaaatgagtgtcaggtgcatagtgagacagaccggagacatggatgcatagcaaacttgtgctcaccatggtttctatcttagttagggaaacttctgtaccttccttagatgttcaggcactccattgaggaccctggcataacattatttattgacagaccatagctcaaagtatagaactggatactaccaaggaggatatactattactattttatctttatcttaaaatatactcttccatctgaggtgaaaattaatccagatggtagaacttattgcagttactacagcattttagcaaatcaaaagccgcagaacaaacatatggacagatggcaggtatgttttcggaatcgtaaacaagttcgtgatgactgtaaaaccaaggggtgtctcacgagggctggaaacctctcacaatgaaacaacacaatgaggatctttgaaaagtactctgacctcctggtgagctggctgatatggaggctgagctccatgtagaaagccaaaggaatttctgcaggacgtcatcatgccaagcacagccgtaacctgggtcccagcccttttcacacgctcaatggttagatcttgggagggaatcaaagaagccatagtaaaatatcaaaatttaaaccccgattttgaatttaaaaagtgttaaaatatggttgtggcctacactcagaaaatctgtgtccttcagatggtttctcagtggcaccagatggtttcaagtggctattcattaagtttctcagtgaaattaccagacatagaataaataaattgtcactgtcttaaatcaacccatgggaaaggaaaactgtgtaaatacagcagagaggaaacattgctcaagggaaaaacaatctccagaaagtattgttaaagaaacagaggccctctttccagccagcgccgagcgatgggcacctctcgggacaactggcacaagggccgcaaagctgggggcaagagaaggccctgccacaagaagcggaagtatgagttggggcgcccagctgccaacagcaagactgacccgtgccgcatccacacagtccgtgtgcgaggaggtaacaagaaatactgtgccccgaggctggacgtggggaatttctcctggggctcagaatgctgcgctggtgaaacaagggtcatcgatgttgtctacaatgcatccaataacgagctggttcgtaccaagaccgtggtgaagaattgcatcgtgcccatcgacagcacgccctaccgacagtggtacgagtcccactgtgcactgcccctgggccgcaagaagggagccaagctgactcctgaggaagaagagattttaaacaaaaaacgatctaaaaaaattcagaagaaatatgatgaaaggaagaagaatgccaaaatgagcagtctcctgggggagcagttccagcagggcaagcttcttgcgtgcatggcttcaaggccgggacagtgtggccgagcagatggctatgtgctagagggcaaagagttggagttctatcttaggaaaatcaaggcccagaaaggcaaataaatccttgttttgtcttcacccatgtaataaaggtgtttattgttttgttcccaaaaaaaaaaaagaaagaaaaagaaacagaggcatcacacttactagaaaaacatattctatttcatatattatggggatatgacgtgatgttttgacatatgcgggcattgtgaaattattaaatcaagtaaataaacatgtccatcacctcacatacttattttttatggtgtaaacgtgtaaaatctactctcttatcagttttcaagtatatagtacattagtatcatggaagtcaccatgctgtgcaatagatcttcaaacgaattccttctatctaaccaaaactctgtaccctttcaccaacgtctcagctttcacatgcccctgacgccagcccctggtaggcaccattctactctctactctgagttcaacatttttagattgcatgtgtaagtgagatcatggagtaattttttatacctggcttatttcactcaacataaagagtcaaatgctcaacatcactaatcatcagggaaatgcaaattaaaaccacgataagatatcacctcacacatgttacaatggcttagtctcagtctgtctttttgttactataaccgaataccagagactgggcaatttctaaagaaaaggaatttatgctttatggtgcttgagtcagagaagtctaatatcaaggcactggcatctcacaagggccttctcactgcctcatctcacagcagaggtgggtgagcaagagaccatttgtccacgagagaaaagagaccatcttttattagaaattcactcctataataactaacccactccattgatagtgacagtaatccattcatgaggacagagccttcatgacttgatcacataataaaggtcccacctctcaacactgttgcattaaagattatttccagatcctaaactttgggagacacatttaaaccatagcattccattcctaatatcaaaatttatgtccttatcacaatgcaaattacattcattccatcccaattgtctccaaagtcttatccagcatcagtgcaaaagtctgaagtccaaagtctcatctaaatcagatatgagtgtgactcgaggcacaatttagcctgatataaattgtttccatctgcgagcctataaagtcaaaacaagttatctactttcaaatacagtgaacaatggggcaggtatgggatagaaattcccattccaaagctcagagagaggcaaggagaaagcggtgcctagttcaaaacccaacagggaaaaaaacattaagtcttatagctggaaaatcatcctctttaacggcatcttgtgcacactggggagggggatgggcccccaaggcctccggcagtcttgcctctatatattttctgggttcagtccactcagccgctctcacaggtgggactctcaggcctctagctctcctaggctgactggaaactctttgtggtacctccaaacccacatttctgcttggcattgtgctaagggcccagtgtggtgactctgtctctgcaacaagtcactgcccgagaccttaggctgtccttaggctgcccgagaccttaggccgtccacagcattctttgaaatctaggtggagaaagccatgccctcgtggttcttgtattctgcacacctgcagaattaacaacacatggatgccatggaagttgatgacttgtaccattaaagtgatggcttgagccacacctaggtcctcctgagccacagcatgggcagccaaggagtgctgtgcctggacaccgggaacagagtcctaaagtgcctgctagaagtcaggccatagatttccttcaaatttctcccaccatataacctcgttcatggctctgaacttccaccttacagaaggacctagggatgaacacaattcagccacgttctttgccactttatggcaaggatggcctttgctccattttccgatgagctattcttctttttctcctgagacctcatcagaacggcctttattgtccacggttctactgacattctaatggtcatcacctaaataatctctaagaagtttcagaatttcctcacagctctcttcttctgagtcctcaaaagaatcacctctagtgttctattcagggcaatccagactttttatagtctgatcctccaaattattccagtctttgtgcattactacatccacttctacattttggggtatttgttatcgcaacagccccacctcttgatactgatttttcgtcttagtccactttgtggtgcaatgagtgaataccacacactggctaaagtataaggaaaagaaatttattttctcgcagctctagaggctgggaagtcaatatcaaggtgttagcatctggcaagagccttcttgctgtgatgtccatgtggaaggcaggagagcaggtgcgaaggatggaaaggggtttaaactcattttttaatgaggaacccaggcctgtagtaactaatctgctaccacaatgagtaacctactctgacgataatggcattcattgcttcatgagggcagagccctcatgacctaatcatttcttaacattcccacctctggacactatggaatttgggattaagtttccaatacacatcctttctaaacagcaggggctttttaataggttgaccacccaaggctgcaggaggctctgaagcagtggcctgaggttggctgtcctttgtgagaatggagagaagtgaactgactcatggagacacaagtagatgaggtaaaggcattcattgcttcattacatggatggtgaggtcgattgaaggcattaacggattaaagatggtggcaaaaccgtctgaggtggagaccacggggagtccatcagaaatggaggacacgtcccaataaatggtgcttcatttccctgcaaagcagaagaaagcaaagaacaaaacacaacatcatagtgtacactgagcagtggattgagagaagagtttcctaaggcataactgacagagtggagaagacacacaaatctttgcatgatgctaacatttggactgtggcttcattatttcttattaatattttactgaaatatcgctagaaggagactgaaaatgaagtgtgaaaagttaaatgggatttctgctctatgtccttttcagatgagaggaactagggaattccagggaagaaacaataatagctgctgagcaaggcttttgcagggcaggacaaggaatccccaaagagaaaacggaaacctcagcttcactttgcatctgctcctgagccaggtcctgagcgacccctgtaggtcctgagtgcccctccgtaggttctgagcatcccttggttgctgggcgccctctggtggtgtctgagcccctctggtggtttctgagccccccgccttatgtctgatcctccctggtggtgtccgagtgcccctgctagtgtctgagccccctggtggtgtctgagtccccttcttagtgtctgagccaccctattagtgtctgaggacccctgatggtgtctgagcccccagttagtgtctgagccaccctattagtgtctgagcccccctggtggtgtctgagcacaggagagctcctctgaaggaagggtctacatggggacaggcgtgcttgtctcagggaagggtccatgtggggacaggtgtgcttgtctgaaggaaggttccacatggagacaggtgtgcttgtctcagggaagggtccacatggggacaggtgagcctgtctgaggggacagaagtgcttgtctcaaggaagggtcctcatgtggacaggtgagctcttttgagggaagggttgacctggggacaggcatgcttgtctgaggtaagggtcctcctggggacaggtgtgcttctctcagggaagggtccacgtggggacagaggtgcttgtctaaggcaagaatccaagtagggacaggtgagctcgtctcagggaagggtccaggtggggacagttgtgctcatctgagagaagcgttgaagtggggacaggtgtgcttgtctcaaggaagggtccatgtggggacaggtgtgctagtatcaagaaagggtccacatagggacaggtgtgcttctctcagggaagggtgcatgtggggacaggtgtgcacatcggagagaatggtccacctggggacaggtgttcttgcctcagggaagagtccaccttctcagggaagaagtgtgctcctctgagggaagggtgcacatggggacaggtgtgcttgtctcagggaagggtccatgtgggaacaggtgagctcatctgagggaagagtccacgtggggacaggtgagctcatctgagggaagggtccacatggggacaagtgacctcgtctgagggaagggtccacgtggggacaggtgagctcgtctgaaggaagggtccacttggggaccggtgtgctcctctgagggaagggtccacgtggggacaggtgtgctcctctggagggaagggtccacgtggggacaggtgagttcatctgaaggaagggtccacatggggacagttatgctcctctgagggaagggtccatgtggggacaggtgtgcttgtctcagggaaaggtccacgtggggacaggtgtgctcaccttggggaagaggacagatgagctcatctcagggaaggggccatgtggggacaggaccaagggttgggacttcagcacaagaatttaggaggaacacagtcttccctagcagcctccttcagggatgtcaaatattttccttctgttccctgtgaaagccttaaaggggtagggaaagggcgttcaacctgcacactcgtagaggggaaaccagcttcattagtaatcgttcatctgtggtaaaaaggcaggatttgaagcgatggaagatgggagtacggggcgttggaagacaaagtgccacacagcgcagccttcgaaacacaccacggtcacgttaagtttaaatggagtgaccacattcgccaggaaagggaaatatttacacttttgaagaaacagtaatttgtgtttctgattatgatctggccttggattttccctcccctcataagcaatgacagaattggcagaaatatgtgaaacgttagttctcagacatgagacacccacagagggccccctgtgcccttccctgagagctgatcagctcctgcatctgaagaaatgaccaaagaccaggagagaaccacacagaagcatcggagggacagcacctggggctctgatggggtcaggaatagcatctgttcccaatagatggactaagtaaaaagtatcataattcacaagagttttacatagcacagaagaaaaagttaccctatatcaactgttgatcttgtgaatccaggaactctggattcaaggtggtcgggcacatcttgatttacgcatttcagggacacatgagacatcagtcaatataagtaagaaggacattagttccatccagaaaggctgagacaactcaaagcaagtcctccccacttagggcttccaggtcacaggtaggtgagagacagatggttgcattcttttgagtttctgataagtgtttgcaaaggaggccatgaggatatgcacctgtctctgtgagcagagggacaactttaaatagactgggaggcagatttgtcctgagtggtttccagcttgacggggcccaagatattttcctttcacaatctggtaacttcaaacaaaacttcaaagccacaacaaaacaacacaacaacaaaaagaataagacatgggtacttattaagagtagaaaaacattcagtccccaaggaaaatattggcagtgtctacctccacatgacaaaggagtaagcagtgtgagccacagaaaggagcactattaacccacagagcaaccgagaataacacgggtgatgcgagggcattggacgcacatcattgcattttgtagattcagaaagaaacggaaaagattgacggtggtaaaagagacagccctgcttccctctcccttttccctccccgatgaggcctcacagccatgaccctcagcctcatcccgcagtgcagcagctgccgtcctgtccaggcccaccccctgccccgccctgggactgttacctcattccctcccggagtccaggtgccccccggggtgtggtgcgggagcctggggaggccctttgttctctgtcagggtctccctgggagggacgcagccaccgcagctggttggggcctggcttcgcccaggacagtcctttcctttcccattgtctttggatgactatcgctgggctgggacatgaggcgggcagaggcgcgggtcacccttaggacccccctcttgctgctggggctctgggcgctcctggctccggtccggtgttctcaaggccgtcccttgtggcactatgcctcctccgaggtggtgattcccaggaaggagacacaccatagcaaaggccttcagtttcccggctggctgtcctacagcctgtgttttggggtcaaagacacgtcattcacatgcggaggaaacaccttctttggcctagacatctgctggtgacaactcaggatgaccaaggagtcttgcagatgggtgacccctacatccctccagactgctagtacctcggctacctggaggaggtgcctctgtccatggtcaccgtcgacacgtgctatggggacctcagaggcatcatgaggctggacgaccttgcgtacgaaatcaaacccctccaggattcccgcaggtttgaacatgttgtttttcagatagtggccgagcccaacgcaacagggcccacatttagagatgatgacaatgagacagaccccctgttctctgaagcaaatgacagcatgaatcccaggatatctaattcgctgtatagttctcatagaggcaatataaaaggccacgttcaatgttccaattcatattatcgcatatatggcaatattacaacttgttccaaagaggtggtccagatgttcagtctcattgacagcattgctcaaaatattgatctgcggtactatatttatcttttgaccatatataataatcgtgacccagcccctgtgaatgaatatcgaattcagagtgcaatgtttacctattttaaaacaactttttttgatacttttcatgttcattcatccacactacttattaaatacgtgccacatgaatctaactatgaacctgaaaggtataacttctgttcccgtatagccctgttacacattggtactccaggcagacattatttattggtagccgtcataataacccagacacagatgagaagtattggtctggagtatgatgataactactgcacatgtcagagaagggcctcctgcattatgcagcgatttcctgggatgacagatgcgttcagtaactgttcttatggacatgcacaaaattgttttatacattcaggccggtgtgtttttgaaacacttgctcctgtgtataacgaaaccatgacaacggttcgctgtggaaacctcatagtggaggggagggaggaatgtgactgtggctccttcaagcagtgttatgccagttattgctgccaaagtgactgtcacttaacaccggggagcatctgccatataggagagtgctgtacaaactgcagcttctccccaccagggactctctgcagacctatccaaaatatatgtgaccttccagagtactgtcacgggaccaccgtgacatgtcccgcaaacgtttatatgcaagatggaaccccgtgcactgaagaaggctactgctatcgtgggaactgcactgatcgcaatgtgctctgcaaggcgatctttggtgtcagtgctgaggatgctcccgaggtctgctatgacataaatcttgaaagctaccgatttggacattgtattagacaacaaacatatctcagctaccaggcttgtgcaggaatagataagttttgtggaagactgcagtgtaccaatgtgacccatcttccccggctgcaggaacgtgtttcattccatcactcagtgagaggagggtttcagtgttttggactggatgaacaccatgcaacagacacgactgatgttgggcgtgtgatagatggcactccttgtgttcatggaaacttctgtaataacacccagtgcaatgtgactatcacttcactgggctacaactgccaccctcagaagtgcggtcatagaggagtctgcaacaacagaaggaactgccattgccatataggctgggatcctccactgtgcctaagaagaggtgctggtgggagtgtcaacagcgggccacctccaaaaagaacacgttccgtcaaacaaagccagcaatcagtgatgtatctgagagtggtctttggtcgtatttacgccttcataattgcactgctctttgggacagccaaaaatgtgcgaactatcaggaccaccaccgttaaggaagggacagttactaaccctgaataacactaattcagcctcccgatccctgtaaagatacagagaatataacagcaaaatctatgaaacaggatcaggggaagggatggcaaagctcaagtccacatttcttgaagtccacaggaagcacagggtcctgtttcacatcacagggaaacgggaggcattggcttctgtcccaggttcttgtaggtcgctgatgctcactctgaaataaatcttcaaaaacacacattggtgccttccacattttcttagactcctctgggagcccaaacttggccagaacctcttgcctggagagacatgaatgagcatctggctcttgtcctgaggtctctggtcccagaattaacggaagttgccaccagctccttacagggaacattcatgacatttctccagaagagagctccagagcaatgagcttcctcattccccaggtaatctgtccttctctaaacccgaagtcagtttagggtgatccagggctactccctgttccctgtctgttcctcacgggggtgctgtgggctttgcagtgagagggacttgggttcaaatcccccaccaagcaaatccccctacctggggccgagcttcccgtatgtgggaaaatgaatccctgaggtcgattgctgcatgcaatgaaattcaactagaaaaataggtagacgtgaggggcaagctgtctgtcatttagtgtgagctctgtgagtggcagctgccccctttcttcctgcccccacatttccttgaactgaaacaggaagggaagctgagtaagtcgtgatgaggaagagaaaccaggcttgtagcagcacaggctggtccgggtggaaaacagggctaggtgtatcactgagttattgtaaaggaaaatggaagttaaatgtataaataactgaatgagataacattttattttaacttaaaattcacactaatattgacttttaaaatgcagtgtagatatgtcagagagaatttcaaaggcaaagcccaccgacggaagaaatcacccttcccataccatccacagaaaactgttggtattctagggtagtactgagatctagcatttttctgaatacatctgtggttctagatgtcctgcttccatagatattgtttagaattcccacccctttctccaaacacagcttgatatcctttctctgaacctgttagaaatttcctccattcagctgtcataaagatgcgagcaatccattcctgtgcctctgtcagtgtgttctattattttgtggctgaacgctaatggacagttaagtgtgaggtcagtgaatacagtgccctccctctatgtgtccttcgggtgtgaggggttttgctgatagagcagcaggccccatcccaccctttatgcatctccgccccccacctcacgctccagctgacctctcccctgtggcctggggcgttccccagggggaatgacctctcctctctccagggcccacccactcagtgcccgtgcaagaccaccacgcttggcacggccccacctcgtgtcagggcctgtgtcccctgccccaccccctaaacagatgggaaccactgggactctgctcagggcagggggcggaggtatgtgtgaaaggaaggcaaatgtgcactctgttggagaaatattataggtagtttgagcaaaaaatctaatgccatgggaacttttagaatgatacgtattttaacaaagaacatgaccaatagagtttgtattgaagccaggaaaacactatttagagcaacagcaatatcaaaaacacaagccaacagttcaccaagaaaaaccaccattaaccccatggaaatggtcttccaagagcatcggcacttaaatcctggaaatctgcctgcctcagcacctgttgtcctgacctgccctcctgtgtgtcctaatcactcccaaacacggggcctgcactgtgggagattcacactgtgccaggtggagggagcaggacaactgctaacaggttgttggtgtggatgccgaggccacccaagcaggtgtaaactcccacctgtggggcagggaagagtgcacgggagacatgtcccgggcatagggtgagggagagctgtgggggctctgggttctgaagtgggttctgaagagggttctggcctggcagggataagaccaaccagcatgtgaggccaggctggagtctggacctctgaagctgcaagggtcatgggctgcttggccccaggggctgtcctggttctctatggagtactttcaaacattctttcttcttccaatccccctccttctctcccaaagcctgcatctcccaaatcctctttgtcggatcctcggcttcactctgcatccgtcctgagcatcgatcttccaattccatcctcttctcttctgctatgtctaagctgctgtgaagccacctgctgtaatttactgctttatatttaatattgtaccgtacatctgttctgtttccctcatcataaatgcttcatttcatgctcagcatctgagaacacaaggccttgtcagctgtcacctccttccgttctctgtttccttcctcctatccccatattgctcatcatgtccagtctcctgccatcctgaatgcttctgatggaaggtctgagatgtctcatgagcactgtgaagattctttgtaatgtgagcttgttccaggcaggaattctccttcacccagccctggaagccaagtataggcagatggccatgctcaatcaaagactgagctaacttaacagtggctttggttttaaggtttctccaatccccagggcacaggatttcagggaattcaggtgagagtctgggtgttacccttcaggaggctgtaaactccatttcacctagtctacaccacagactatggaaactatatatatatatagttctgtccctctagagaaacctaatatgtatatatacaatatataatacgtattatatattatatataatacgtattatatattatatatattatatatatattagagtttattgaggagtattaaactcacaatcacaaggtcccacagtaggccatctgcaagctgaggagcaaggaagccagtccgagtcccaaagctgaagaatttgaagtctgatgttcgacggcaggaagcatccagcacaggagaaagatgtaggctgggaggctaagccagtctagtcttttcacgtttttctgcctgctttatatcctggccacactggcagctgattagatggtgcccacctagattaagggtgggtctgcctttcccagtttactggctcaaatgttaatctcctttggcaacaccctcacagacacacccaggatcaatactttgcatgcttcaatccaatcaagttgacactcagtatcaaccatcacaagtccaccccttgtcaacttgaacccatacaaatctcctgagatcatacataatcttcaaataaagacaataataaggtcataattacacctaatgtaatacaactatcttttgtacaaccagaaatgcaccaatccccaacccaaatgctattatgtaaagttaagaacacttaaatgctgatatgaagtcaataaattttatgtcacatgataaaggaaaaaagaaatgaaggaattttcttagtacaagtgtgtacatgcacaaacatgtttttaacaaaagaagaaggaaatactgatgacaattacagtcctcatttctgcaactgatcacgtggttgtagctggtattgatgactaccttcttctactacccattctgtattccctttgccttcagcaagcatcacagcaggtagagttttttctcctagtggagtgatgcaaaccttcattcctgaagggtctgggccatttgtagtcctgcctggattgggctgttgtagtttcccgttgaccttaatgacagggcatggtaatgttaagagacgccctaatggatctcctgtattccatacatattcttccttacctccattgtggagtaatagactgattgcatcttgatagtccaggtcaatcagcccagccaacactgtaactcccctcttagcctgtggacttaaaggtaggaggggcccaaagtggccaggtggaaatctttacttccagtttaatggaattgttgttgtttctcctgatggcagcattattcccactggaactaagacctctaggccaacagaatgtaatgtcatgggaccaggaagcaaaaattttgctagtggatcactaggggtgatggtgaatggtgccatttccacttccaccccttgattcctggatccatgaattatggctatgggagaaagagtaccatatattggatgctgatttggagcatacatggccttttggagagctttgccccagccctgcaaagtattggagcctagttgacattgtaattgtgactttgaaaggccattccattcttctatcaatccagctgcttcaggatgatggggaaaatggtaagacaagtgaatcccatgagcatgagcccactgccacacttctttagccgtaaagggagtgccttggtcagaggcaatgctatgtggaatactgtgacagtggataaggcattccatgactccacagatggtagtcttggcagaagcattgcatgcatatctgcagtaagtgtctatttcagtgaggacaaacctctgccctttccaggatggaagaggtccaatataatccaacctgccatcaggtagctcactgatcaccctgaggaatggtgtcatttgggtagagacccagagccaaaccagatcacgccacccaacccctcccaaatctcatgtcctctttgcatttcaaaaccaatcatgccttcccaacagtcccccaacatcttaactcatttcagtattaactcaaaagtccaaatccaaagtcacattggagacaaggcaagtccctttcatctatgaacctgtaaaatgaaaaacaagtcagttacttccaagacaaaatgggggtacaggcattagatacatgctcccatttcagttgggagaaatgagccagaataaaggggcttcaggtcacatgcaagcccaaactccagtggggcagtcattaaatcttaaagcttcaaaataatctcctttgactccattcctcacattcagggcatgcttatgcaaagtgggggctcctacaaccttgggaagctctcaccctgtggctttgcagctctgaccccatggctgctctcatgggctttgcagagttcagccctcctggctgctctcattgagtgcatgcagcttttccaggtgcacagtgcaagccgttaatggatctaccattctggggtctgaaagatggtggccctcttctcacagccccattagtcactgtctccagtggggactctgtgtgggggctccaaccccacatttcccttctgcactgccctagcagaggctctccatgaaggctttgcccctggcgcagacttctggctggacatccagtcatttctataaatcctctgagatctgggtggaggatcacaaagctgaactcttctcttccgcacatccctaggcccaacatcatgtagaagccaccaatgattggggctttctgaagcaatggcctgagctgtacattggacttttttagccacagctagacctggagcagctgggacacagggcaccaagtcccaaggctccaaagagaagctgggccctggacccagcccatgaaaacatttttccctgataggcctccaggcctgtgattggaagggctgctgcaaagatctccgacatgccctggaaacattttccccattgtcttgattattaatattcatctcttcattacttatgcaaatttctgcagccaacttgaatttctccctagcaaatgtgtttttctttactaccacatggccaggctgcaaattttccaaacttttatgctctgtttcccttttaaaaataagttcctatttcagatcatctctctcaagggcaaagttccacagatttctagggcagggacaaaattccatcaagcttggttttatacattttagagaggcatgagacatcaatcaaatacatttaagagacacattggtttggtccagaaaggtggaacaactcaaagctagggcttccaggctataggtgaatttaaatattttctggttgacaattggttgagtttgtctaaagacctgggatagatagaaaggtaatgttcaggttaagataaagattgtagagtccaaagttcttttgaagtcttatagtggctgcccttagagataataggtgacaaatgtttcctattcaaatcttagttgaactctttaggattgggaggttctagaagaaaaagatctagctatgttaatagagattctttacagatgcaaattttcccccacaaagaacagctttgcagggccctttctttctttctttctttctttctttctttctttctttctttctttctttctttctttcttttttagatggagttttgctcttgttgcccaggctagagtataatggcacgatcttgtctcaccacaacctccacctcctgggttcaagtaattctcctgcctcagtctcccgagtagctatgattacaggcatgcaccaccacacccggctaattctgtatttttagtagacacagggtttctccatgttggtgaggctggtctcgaactcccaacctcaggtgatccgcccacctcagcctcccaaagtgctgggattacaggcatgagccaccatgcccggcctgcagggccatctcagagtatggcaaagaaacatgttttggggtaaaatattttgattttcttatttgtctcataatgttatgccagagtcagtttggaaagtaaatcatgatatataggtttaaataaaacccatctgatgagaatttatgatttgtagagcatgcctccccagactctttagataggaatttgggcaagatgaaaaaaaaatcagagtttagtcctcactacctaagaccagctcagcttggacttcactgttcatgtcactatcagcattttagtcaaaaccactcaataagtctctaggaagttccaaactttcccacatcttcccttctcctttcaagttctccaaactgttccaaccgctgccaggaggtacccagttccaaagttgcttccagattttgagttatctttatagcagttccccactcctggtaccaatttactatattagtctgtttccacagtgctataaagaactgcccgaaagtggttaatttgtaaagaaaagaggtttaattgactcacagtgctgtgtggttagggtcggaggctcaggaaacttgcaatcatggtggaagtggaagcaggcatgtgacacatggcagcaggtgagagagagaaagagagagagagggaatgaaggaggaaccaccatacatggataaaaccatcagatctcatgagaactcactcactatcaggagaacatgaggacagcatgggggaaaccacccctatgacccagtcacctcccaccaggtccaccccttgacacataaggattactatttgagatgagatttgtttaatgacacagagccaaaccacatcagcatgtgacaaaggtctaatatcaagaatctatgagggggcagttccaaaatggctgaataggaacagctccagtctacagctcccagcatgagctacacagaagacaggtgatttctgcatttccaactgaggtactgggttcatctcacgggggcttgttggacagtgggggcaggacagtgggtgcagcccaccaagagtgagctgaagcagggcgaggcattgcctaacccaggaagtgcaaggggtcagggaattcccgttcctagccaagggaagcggtgatggacggcacctggaaaatccggtcactcccaccctaatactgcacttttccaacggtcttagcaaatggcacaccaggagattatatcctatgcctggcttggaggttcccatgcccacggaacctcgcttattgctagcacagcagtctgagatcaaactgcaaggtggcagtgaggctgggggaggggtgcccacaattgctgaggcttgagtaagtaaacaaagtggctgggaagctcaaactgggtggagtccactgcagctcaaggagacctgtctgcctctgtagactccacctctgggggcagggcatagctgaacaaaaggcagcagaaacctctgcagacttaaatgtccctgtctgacagctttgaagagagtagtgtttctcccacatggactttgagatctgagaatggacagactgcctcctcaagtgggtccctgacccccgagtagcctaactgggaggcaccctccagtaggggcagactgacaccttacacggctgggtgcccctctgagatgaagcttccagaggaattatcaggcagcaacatttgctgttcagcaatattcgctgttctgcagcctctgctgctgatacccaggaaaatagggtctgcagtagacctccagcaaactccaacagacctgcagctgagggtcctgactgtcagaaggaaaactaacaaacagaaaggacatccacatgaaaaccccatctgtacatcaccattatcaaagacaaaaggtagataaaaccacaaagatggggaaaaaacagggcagaaaagctgaaaattctaaaaatcaaagtgcctctccccctccaaaggaatgcagctcctcgccagcaatggaacaaagctggatggagaatgactttgatgagttgagagaaggtttcagatgatcaaacttctccgagctaaaggaggaagttggaacccattgcaaagaagctaaaaaccttgaaaaaagatcagatgagtagctaactagaataatcagtgtagagaagtccttaaatgacctgatggagctgaaaaccatggtatgagaactacgtgatgaatgcacaagcttcagtagccgattcgatcaactggaagaaagggtatcagtgattgaagatcaaatgaaagaaatgaagggagaagagaagtttagaggaaaaaaaagtaaaaagaaagaaacaaaccctccaagaaatatcagactatgtgaaaagaccaaatctatgtctgattggtgcacctgaaagtgacagggagaatggaaccaagttggaaaacaccctgcagtatattatccagcagaacttccccaacctagcaagacaggccaacattcaaattcaggaaatacagagaaccccacaaagatactcctcgagaagagcaactccaagacacataattgttagattcaccaaagttgaaatgaaggaaaaaatattaagggcagccagagagaaaggtcgggttaccctcaaagggaagcccatcagactaacagctgatctctcagcagaaactctacaagccagaagagagtgggggccaatattcaacattcttaaagaaaagaaatttcaacccagaatttcatatccatccaaactaagcttcataagtgaaggagaaataaaatcctttacagacaaacaaatgctgatagattttgtcatcaccaggcctgccctacaggagctcctgaaggaagcactaaacatggaaaggaacaactggtaccagccactgcaaaaacatgccaaatcataaagaccaccaaagcgaggaagaaactgcatcaactaacgagccaaataaccagctaacatcataatgacaggatcaaattcacacataacaatattaacctttaatgtaaatgggctaaatgctccaattaaaagacacagactggcaaattggataaagagtcaagacccatcagtgtgctgtattcaggagacccatctcacatgcagagacacacataggctcaaaataaaggcatggaggaagatctaccaagcaactggaaaacaaaaaaaggcaggagttgcaatcctagtctctgataaaagagactttaaaccaacaaagatcaaaagagacgaagaagaccattacataatggtaaagggatcaattcaacaagaagagctaactatcctaaatatatatgcatccaatacaggagcacccagattcataaagcaagtccttggagacctacaaagagacttagattcccacacaataataatgggagactttaacaccccactgtcaacattagacagatcaacgagacagaaagttaataaggatatccagcaactgaactcggctctgcaccaagcagacctaatagacatctacagaactctccaccccaaatcaacagaatatacattcttttcagcaccacaccacacctattccaaaattgaccacatagatggaagtaaagcactcctcagcaaatgtaaaagaacagaaattataacaaactgtctctcagagcacagtgcaatcaaactagaactcaggattaagaaactcactcaaaaccactcaactacatggaaactgaacaacctgctcctgaatgactactgggtacataatgaaacgaaggcagaaataaagatgttctttgaaaccagtgagaacaaagacacaacataccagaatctctgggacacattcaaagcagagtgtagagggaaatttatagcactaaatgcccacaagagaaagcaggaaaaatctaaaattgacaccctaacatcacaattaaaagagctagagaagcaagtgcaaacacattcaaaagccagcagaaggcaagacataactaagatcagagcagaactgaaggaaacagagacacaaaaaaacccttcaaaaaatcaatgaatccaggagctggttttttgaaaagatcaacaaaattgatagaccactagcaagactaataaagaagaaaagagagaagaatcaaatagatgcaataaaaaatgataaaggggatatcaccaccgatcccacagaaatacaaactaccatcagagaatactataaacacctctacggaaataaactagaaaatctagaagaaatggataaatttctcgacacatacaccatcccaagactaaaccaggaagaagttgaatctctgaatagaccaataacaggctctgaaattgaggcaataattaatagcttaacaaccaaaaaaagtccaggaacagatggattcacagccgaattctaccagagctacaaggaggagctggtaccattccttctgaaactattccaatctatagaaaaagagggaatcctccctaactcattttatgaggccagcatcatcctaataccaaagcctggcagagacacaacaaaaaaaaagagaattttaggccaataaccctgatgaacatcaatgcaaaaatcctcaataaaatactggcaaaccgaatccagcagcacatcaaaaagcttatccaccatgatcaagtgggcttcatccctgggatgcaagtctggttcaacatacgcaaatcaataaacgtaatccagcatataaacagaaccaacgacaaaaaacacatgattatctcaatagatgcagaaaaggcctttgacaaaattcaacaacacttcatgctaaaaactctcaataaattagatattgatgggacgtatctcaaaataataagagctatctatgacaaacccacagccaatatcatactgaatgggcaaaaactacaagcattccctttgaaagctggcacaagacagagacaccctctctcaccactcctattcaacatagtgttggaagttctggccagggcaatcaggcaggagaaggaaataaagggtattcaattaggaaaagaggaagtcaaattgtcgctgtttgcagatgacatgattgtatatctagaaaaccccatcgtctcagcccaaaatctccttaagctgataagcaacttcagcaaagtctcaagatacaaaatcaatgtgcaaaaatcacacgcatttctataacccaataacagacaaacagagagccaaatcatgagtgaactcccattcacaattgcttcaaagagaataaaataccttggaatccaacttacaagggacgtgaaggacctcttcaaggagaactacaaaccactgctcaatgaaataaaagaggatacaaacaaatggaaaaacattccatgctcatgggtaggaaggatcaatatcctgaaaatggccatactgcccaaggtaatttatagattcaatgacatccccatcaagctaccaatgactttcttcacagaattgggaaaaactgctttaaagttcatatggaaccaaaaaagagcctgcaatgtcaagtcaatcctaagccaaaagaacaaagctggaggcatcacgctacctgacttcaaactatactacgaggttacagtaaccaaaacagcatggtactggtaccaaaacagagatacagaccaatggaacagaacagagccctcagaaataatgccgcatatctacaactatctgatttttggcaaacctgacaaaaacaagaaatgggaaaacgattccctatttaataaatggtgctgggaaaactggctagccatatgtagaaagctgaaactggatcccttccttacacattatacaaaaattaattcaagaggattaaagacttaaatgttagacctaaaaccataaaaaccctagaagaaaacctaggcaataccattcaggacataggcatgggcaaggacttcatgtctaaaacaccaaaagcaatgacaacaaaagccaaaattgacaaatgggatctaattaaactaaagagcttctgcacagcaaaagaaactaccatcagagtaaacaggcaacctacagaatgggagaaaatttttgcaatctacttatctgacaaagggctaatatccagaatctacaatgaactcaaacaaatttacaagaaaaacaaacaaccccatcaaaaagtgggcaaaggatatgaatagacacttctcaaaagaagacatttatggagccaaaagacacatgaaaaaatgctcatcatcactagccatcagagaaatgcaaatcaaaaccacaatgagataccatctcacaccagttagaacggcgatcattaaaaagtcaggaaacaacaggtgctggagaggatgtggagaaataggaacacttttacactgttggtgggactgtaaactagttcaaccattgtggaagtcagtgtggcgattcctcagggatctagaactagaaataccatttgacccagccatcccattactgggtatatacccaaaggattataaaacatgctgctataaagacacatgcacacgtatgtttattgcggcactattcacaatagcaaagacttggaaccaacccatatgtccaacaatgatagactggattaagaaaatgtggcacatatacaccatggaatactctgcagccataaaaaaggatgagttcatgtcctttgtagggacatggatgaagctggaaaccatcattctcagcaaactatcacaaggacaaaaagacaaacactgcatgttctcattcataggtgggaattgaacaatgagaacacttggacacaggaaggggaacatcacacaccagggcctgttgtggggtggggggagtggggagggatagcattaggagatatacctaatgttaattgatgagtttatgggtgcagcacaccaacatggcacatatatacatatgtaacaaacctgcacgttgtgcacatgtaccctaaaacttaaagtataataaaaaaatttttaaaaaaagaaacacctgcttttttctgttttccatttgcttagtagatttttctccatccttttactttgagcctggggatgtcattgcatgtgagatgggtctcttgaagacagcatacatttgggtcttgcttctttctccaacttggcaattctctgccctttaattggggcatttagcccatttacattcaaggttaatattgatatgtgcatatttcatcctgttatcatgttgttagctgctcaatatgcagatttgattgtatagttgatttatagtggcaatcgttatgtacttaagtgtgtttttgtggtggccagtaacgttcttccattatcatatttagcaatcccttaagggcctcttgtaaggcaatctagtggtgatgaatacccttagcatttgcttgtctgaaaaggatcttatttctccttcacttgtgaagcttcatttggctagatatgaaattcttgcttggaatttcttttctttaagaatgctgaatataggcccccaatctcttctggattgtacagtttctgctgaaacctccattgttagcctcattgggttccctttgtatgtgacctgaaccttctttctagctgcctctaatattttttttcctttcaacctttaagagtctgatgtctgatggctatatgtcttagggatggttgtcatgtataatatcatgcagaggttatttgcatttcttgaatttgaatgttggcctctctggtgaggttggagaaattttcatggaggatagcctgaaatgtttttcaagtttctttttttctctttctcttcttaagggataccaatgtgtcatagatctggtctttttacataattgcacatttctctgaggttttatgccttcttttttattctttgttctttatttttgtctgactgagttaattcagagaatcagtttttaagctctgtgattctttcctcagcttggtctattctgctgttaatacttgtaattgtattctgaaattcttgaagtgagttttttagctctatcaaatcagtttggttctttcttaaaatggccatttcatctttcagcttctgtatcattttactttatttcttagctcccttggattgggtttcaacattctcctgaatctcagtgatcttctttcctgtgcatattctgaattctatgtctgtcatttcagccatttcagtcaggttaagaaccattgctgggaaaccagtgtgattatttggaggtaagaagacactctggattttagagttgcagagtttcttgcattaattctttctcatctttgtgggctgtttctttaatctttgaagtggctgtcctttggatgtttttgtcttttttgttgttttttggtgtgtgtttttgtttgtttgttcatttgtttgttttttgctcttatcttctttgatactcttgcaggtttgattgtggtataaagtggattcagttagctgtgtttcttgaaaatcttagagggtccaggctcacctcagcactcttgtggtgtgttctctgctctgggactgggcccctggctttattctctggccccttgagtttagaaacttgctgcattggaggggctgaggtgttcccagtccattggccacaacactatagtagggggtgccggccaaagcacttcattagagtggtggcagtgggatccattcttactcatgggtgccagcagttgtggagtcatggcagggtgcacatgcatctgctggggtgggggtactggcaggagcagagtggcagcatccctacataggttcctgctggcagtcacagcgcagtgaggtgcccgtgtgttggcagggacagggtggtggggcacacatgcacatgcttgctggtggtagagggagttgtgatctgctgtgcactcatgccagcaaagcagttgggaggtactatgggtggactggtgcacatcagcagaggctggcctgctggaggtctccaatggttaggcatggtctgctggcaaaggagctatgatgagggcccccaggaaacaccctggttgggcttccaaggctgtactgcaagcaggcacagccagcctggggccccaggagaggccagaaggcaaggaaattctcatttcagatgggccctgtcccatggacaagaccaccctgctttattcaggtcccatagtcactctaaggttaaaatctcctagaggaggttggtgagccttgggggatgggtgtcccctggctgtgctccactacagccattctcatgtcaaacactctgggctttacacagactggagtcctgcccctggcatctctctaagcagctgtcccttccagcacaagtgtccatgggggtcatggggtctcctgctgctaggattctggaggcccatggcaacagcaggccactcctcacctgttcaactcaacctttccccaggagttgctgggagccaggaatgagtcctggtgcttggcatccccatgcagggttcccatcttcctccaccttcagctcagcatctgtgtcctcccccgtctactctcaatccactctcaatgcctccccttcaaagatctgcttggaaagcacccgtcttcctgatgtctcactccctccatggcagatattcctcctggctgcatctagtcagccatcttgactcgcctccaaagtctttttaattaccacttcggttaaattagtaactatcattttacaatggcctgtgattctgttttgatcaaatattttgagccttttagcatctataacaaatgttctcaaaaatcaaaatcctaaatcaagtctctgccttagtcttatttctggggcttattaaggctataaaaattaatcaccataaggttgtacaagctttttacagcttccagtcaggctatgaactccagtatcaccacctccagcctgataattacatatattggaagaaaatcagttaaaggactccctctagacccttgaaagggtgtgagagacaacatggtttcgcctgccttcatgtgtcccagtccatccctgtggctgcctctgtccacctcagcttgcccactgtctttccttcccaactgtctgccctgctgacttctggcctcagtgacagatgcaaagacaaggcgacagccccacatagaccgtttaaccagtcccacatttgcataagctaaatggtcatgtcacagtctgttgcccaggctggtctcaaactcctgggctcaagtgatccacccaccttgacccccaaggtgctgggattacaggcttgagccacagtgcccagccaagaacccgtttttgagtgggcaccttggcacacacctgtaaacgcaacactttgggaggccaaggtgggagtgtggcttgaggccaggaggttgaggttgcagtgagctatgatggcaccacctcactccagcgtgggtggcagagtgagatcctttagaaaaaaaaaaaaaaaaaacttgttttctctgcagccgggctccgtgaccaaacacaaacacaaacttcccctccagagggtccaggaggggctgggctgcaggaggtgcttagggcctcttagggaatggtaagtgaccacccaacgcaggcactcagccccaggggcatatgcagagagagggtccaggaggagctgggctgcaggaggtgcttagggcctcttagggaatggtaagtgaccacccaacgcaggcactcagccccaggggcatatgcagagagagggtccaggaggagctgggctgcaggaggtgattagggcctcttagggaatggtaagtgaccatccaacgcaggcactcagccccaggggcatatgcagagagaggctgggaggacactttcagtgactggggttacaaaccccaaccataagacattgctggctctgtgagccgccacctccagaaatctcccacttagttcttagcacttatccactcttcccttttcctactctcaattcctggaggatgccctcctttctcaggctcagaccaacctaccagctccactctagacctgaacacatgactcctccctctgtctccacctggaaatctcatcagtgcctcacatttacactcctgaaaatcaggtcctgcctacccaccctcttgctccacctgattcctgccctgtttcagccagagaccttgcagtctcctttaactctcaaacccacccatgtcgtgtgagcatactgactgtgttctatgcaagaaagagcagtttcttggtggtcctgcggttttattagtccagaggcaaagcgttggcagagctggtttcttctgaaccctgggagggagattctgttttcatgccttttccagattctagaacccatattccttgctctgtgtccccttcttccatcttcaaaggccatcctctcatctctgtgtccatcatcacatcacccttcccctgactctggttctcctgcttccacttataagcacccttgtgattacatcatacccacccagacaatgcagggccatattctcccctctcgagattaatttaatcacatctacaaagttcctcgtgccatatgaggtcactaaaccacatgttctgggggtttgaatgtaaacatttgggggatgcattattcagccacccacaagcactgctccccactggccacacactatgcacagccgagatcatgcaagtgaggcacgttcatcaacagcagcttcagcaggaaactatatgctccactttcctgccatttgtatctggatttttttttcgctatcattgtagaaagagtggtattgtaaaattaaagatggattattttctttctagaacactttggcaatctatccaacattatttatccccttctgagtgtcaagtgtgaggtcattctttcattgagagctcaatgcctacaattatgataatgcatattgggtactttcacacatcagaaagttcttctttcttaaaatctgttcttgaattattcattcttctctagctttttgttgatctattttataattttagaaaaatcagaaagtaacttgaagtatctgtcatctctacaggtttacctccctctttgtggccttcagaatgtcatgacacgcttttcccttgctcatcacatggtttctatgtatgagacctcatcacaggagctgtggtcccccgggagcaggcatctgtggatggtgccttgctcctggctgctgggacctgtgtgctgccagtggcactccacgacagtgatttcccagctcagttttgcagctccagatggtgggtgagacactaggaccactttgtgaacagcgagggcttggggtttgcttttctaccatgtccagggctgctgttcatgagggaatgtttctaacctgacatcatggctgaagccaacttagaacctctctagccgtatggggagtaggtgagtgatacagatgttaattagctcagtggagccactcccctatgtagacatgttacaaaacattatgctgtacagaataaatataggtcatttttatgtgtcaatcaaaagagaaactaattatttaaaaaaaaaaaaaaaacctctctactcaagccgaaacctcagctccagtcccacaagtcacacaaggctgctcccgtcctgtgtatgttaaacctacctcagaaatgcaagggggcattcaggtttcattctcaattcaaatgccctttttaattttgtctattcctagcacctggcaacttccagctctttttttcggggctcattcattatttaaagcacgtataatttttcacccacattctaacacatgtagtactgtagagaatccttccctaggaggatctacagcattagaaaagaattaagaactccaatatttacaagaaggaaaaagcaaaaagagatcaaaaaatgggcaacttctagaaatagaaaaccctcatgagtatgatgataaatcgctggcacacatgtgaatagttacttgatgcttatagtgatgtctgggaaaataacatgaaatacttataatctgtttctcacacatgtaattcaaaagaatagagagaagatgatttgaaatattcttaagtttgtaggaaaaaagctacttccatatgcataattgcatgtattttgatactgccattattaagaactatctaagagggtccattaaaaataaaatttcttggctgggcacagtggctcatgcctgtatcccagcactttggaaggccgaggcaggtggctcacctgaggtcagaagttcaaaaccagcctggccaacatggtgaaacgctgtatctaccaaaaatacaaaaattagctgggcatggtggcatgcacctgtagtctgagctacttggggggctgaggcaggataatcgtttgaacccaagaggtgtaggttgcagtgagctaagatcataccaccgcactccagcctgacagacaaagcaagactctgtctcaaaaatattaaaataaaatttctcattcctattacagagtaatttaattcattaatgccctgccctgttacaaaactcatttgtaaaatactaattgtaattgtgaaaaaatggcaattgatactaattttaaattctaaaaacagggcacccatattaaagattattctgcagtaagagaattagctataacattttgtaataaggtggagaaaacattctccaacttacaatggttggtgagaagaaagtttccagcacggtagatggaccctaagagcccttgttgaaataataagacaaaaagatatacagagagatgagccagatgaagggagacagagagagagagagagagagagagagaggcacagaaatgagagatacaaagtgaaagagggcaacctgtggggtcatcagatatttgttttctgttttgtttattctaacataaaggcagtggtgggtcatcgatgtatttagagtttgcacaatcactgtggaacacagacagacacaggggaagaggagaaacacagggcggtggcttgcccttggactgttcttagttcctcaaaacgtaacagctttgcccaacctaagggaactttcagcagctgctcttctgccataggcctctttcctgccttgttttcatgtggctgactgtttctgttcctgcaggtcttagctcatcagacaggcatttattacctctgtgtcaacagtgggagcttccattactctctagcatgacactccccttcctcttttaggaaatttaacatggaagtgagtttgccatcggccttctccccacagtgttaacagtggtgaggaagccagcctgttccaccttgcccctcccatgattccaacactgagttcagacttgtcacatggaacttatctttgcatgtttgtggcacagacagatggacccaaccatggattagtggatggatggatggatggatggatggatggatggatggatggatggatagatggatggatggatggctgagtaggtgtgtggatggaagagtgaaaagatagatggatgcatgtatgggtggatgggtaggttgatggatgcatggatgggtggatggatgggtgagtggatgaatgggtgggtaggtgggtggctacatgcatggatgagtacttggatagataagtgagtggatggatggatggatggatgaatgggtatgtgaagggatggatgtattagagtgggtagttaggcaggcatgagctgatagtcaagtgattgttaaactgcctctctaaaataataattggtctcggctggacgcggtggctcatgtctgtaatcccaacactttgggaggctgaggtgggcggatcacaaggtcaagagattgagaccatcctgaccaacatggtgaaaccctgtctttactaaaaatacaaaaattagctgggcgtggtggcgtgcatctatagttccagctactcgggaggctgaggcaggagaattgcttgaacctgggaggaagaggctgcagtgagctgagattgtgccactgcactccagcctggtgacagagcaaagctctgtctcaaataataataataataataaataataattgatctcagccagcgccaagaaaaggcagtctcccaatagatagaaaacacccgaaactggtcatcagcagcttcctgataagatctcaggcattgggtgagtgggctcaagcatatgcactaagaggcaaagtggcagagtttaactggcacataatcttcctctaggaacactctaatagtaagagaaggacacctcaaatgagcatgtgcacatttcattaaacccactgtgtatgcagcccctcccaagtgctggcaggccactgtacatgtgggcagcccactccaagggaagaatcaagggagaagaaatacaaatcccagaaccatgtcaatgtataaaaccccaagtcaagggccggacagagcacttagatctctcaagtcgcccacttagccctcttccaagtgtactttacttcctttagttcccactttaaaactttaataaacatttactcctgctctaaaacttgcttgggtctctcactcttctgtatgccccttggccaaattctttcctccaaggaggcgagaatcaagttgctgcagacctgtatggattcgctcctgctaacagatagctggatgggtggacagatgcatgaattagtggatggacgtttggatgtgtgggtgggtgggtggattgtgggatggctggatgaatgcatggctggatgggtggacagatgcatgaattagtggatggatgtttggatgtgtgagtgggtgggtggattgtgggatggctggatgaatgcatggctggatgggtggacagatgcatgaattcgtggatggacgtttggatgtgtgggtgggtgggtggattgtgggatggctggatgaatgcatggctggatgggtggacagatgcatgaattcgtggatggacgtttggatgtgtgggtgggtgggtggattgtgggatggctggatgaatgcatggctggatgggtggacagatgcatgaattcgtggatggacgtttggatgtgtgggtgggtgggtggattgtgggatggctggatgaatgcatggctgggtgggtggatggatgcatggataagtggtggacggatggacgggtgagtggatgggtggatgtgtgtgtggatgggtggataggaaagccctctaattgattacagggctcagtgtgtgcttcaacatcatgatggcatcatcacattggtccctgtatgaagcagtgggggaggagagtgtaccaggggagcaggaatgacttttctccagaatcgacctctcccaccctgcagcctgggctgtgcaggccacattggagaaggtgcggtcgactactcctaaatgttgttgtgtccaatggcttgttgacgttgatgtaggaatgagcctacatctccaccatagatggaactgtttgggtccccaaagcagaaagcctcttctgttgcaggtgctgaagtttccatcttcttctgcttatacggaagctcacgcatcccttggatggcaggcgtcaggttcctgtgcgcactgagttccccccttacatgctttggacagaagtgtgagacacacaagattgctgcaggaagtccacctgtggggatgctgcgacttctccagcaagaacacgagtctgctcattgaccatcaccacacataacaaattaagtgtcccttttttgataacacgtcattgtttcacagagtattcttttaaagtgtataagttgactgcagttattattttttacttctgttactaatttactcataattaggcacaatttacacttaagaaatttcttaatagttttttcctccttaaggtgaactacagtcagataacatacttatcaattgtctctagctcttgtcagaaaaacatatagatgtgtgtgtgcgtgtgtcttggcctttccaatgatgaattaagatgtgcattgagaaggcattcactttatttgacgttaaggaagtaccaagaagacgctctccacagaccctgggaaagccagcagctgcaccccgaggctgtgccaggcagggaacaaggaggcagcaccacctgctgggcagggaaaatgtcctcccagtccctgccgcttctctgcagaggcacaaagagctgccccttctcctgggccttctcctgggctgatgagattgctccccgatatgccaaatcagggttgtgcatctgaggctctgtctagactctcagctccttcctactcctgcaaagtgaagaaaacaatgccaaggggtcctggaggcgtctctacccctggagagttttgactctcttcaatagtctccactaccctgccctcactccatgtcctccgtttctccctaaagcggtgcccagtctgattgcactgtggcagggataacgaggggccaggacatcaggggagagaagtttctacctgagtcacagcagcggctgccctgcagactcctgaagacacaagacacatttccatcccagagacccagcgaaatgcaacctcaggctagagacagccagttattttttcttgttctgtcctggagaggccactgagaaagtcgagccccttgttgaggaaaacatgagatctctgtgtgtcgtcctctgcctgatggctgtacctccatgtgagtgtctcagagatttcagaacgggggctgtgggctgtggtgtccgcttgtgactcatctctttgcttcttgtccctgagtgtcctgcatcagatgcagctactggagtcatgcccagggctggtgaggtcctcacagacctctgggcctggacccagcagccctctgggaaggcgctggggcacctcagctccaggggcagcacacacttcagcccagcctttctgggccaactctccatctgtagagacacatccaaggcccagttatccctgcagctgagctccgtgatggccaagggcagggccgcacattcccgtgggagacagaatggggacctcagcgtgagcccagacacaaacctccctgcagggaagcacaagaccaccaggcggcgctccagaccacacagcggccccagaagcaggttttagggggcggggcagacgtgtccgcgttgagtcaggtcattggttttactttccctgagcaaacggcctctgccaaggactcactgcacctctcaccttcacagttgttttttttttttttttaatcaccctgtagagttttgctagctaatttagatattgaggagtgcttcatacttccttgggcctctgcttgcagaaacatagcaattgtaaggaggcacgtgggaaagccccggctcggtgacccgggggatgctgctgtggccctggcaagagggcgtcgggccgcagtaacaaaggtgcagacggctctcagcctgcgcccgcggagtacaacacataagggctgtaacctaacgaaaaaagaatcgcagtgcaactgtcctgcatttgagtttgtgatcagttttgccctttgtctttaacaggttctaacataaaattttgaatgttggttcaagccctgtgggtaaaatgcacttacccacattccttaaacaaatagaacactgaggtggaaatgttttgaaaaagtagttttcagacatttggaaacaagcatcacaggatcataacccctgagaaaagaaaaacaaatgaacgaatcctgctattgcctgaaagcagctgccaggacacacggaaaggcttagtgagctgagcggacagagagcagagttcaaggcagcagcagcccgaggggaggagcaccggggagcaggctgctgtgcagccaggatgggccggggtggggcggggggagaacagctggagacttgccgcagggagggggatccctcaggtttggggctgagaactgacttatgcctgacttatgcctgcatgaaaagaaactactcgatatcagggggaaatcaccagaaacctgtggacccaaaactacacagagcctacacaaggaaagcattgtttgtgttctcccagccagggtggaaagaccttgagatatgtaaagcttcaagcaatcttccgaagtaatctcgtgagtagtggtgccacattaattcaggactaaaggctgctctgaactgaacctaagaaatgcttcaagtgtagcctggagcccgggtgcagtggctcacacctgtaatcccagcactgtgggaggccgaggcaggcggatcacttgaggtcaggactttgagaccagcctggccaacatggcaaaacctgtctctactaaaaacacaaaaattagctgggcgtggtggcagatgcctgtaatcacctcccacctggacccttccttgatacatcagaattacaactagagatgagattggggtggggacacagagccaaaccgtatcacataggaacctaaaaggataataaagtaggaaaacttcccacatcagtaaccctttatccgatagtaatcccaatctgcaaagtaaaactgtgtgattttactaagataacggaatcttctctacagaaggactttccagtgcaaaagctccccaccctcaccatgaaatgcacgtgaccatttccaatttgtgtaaagtcctcagttagtactgagacttcggaaggttagaaatccctttgctcatgctgcatggtccggatgagatgtaagaatcattagctaatagacatgcaacagcttttgtgtgaaagatgttatgagacatttaaggtatttgcttgtgattactaagcattcattgtatcattggagcacatgtgcttttataccctggagaaattccagtaattgaattgctgggttgaatgggattttgatttggattaaatttaaactatagattttatttagggaaaactggcatcttaattatgttattggggggcccttgctcccagagctcccaagatggtggcaggccgcttccaaaatgaccgcaggccacttccaagatggtggcaagcctcatgttctctgacctggggttcttggcctcacggattccaaggaatggaagcttgggccatgcagtgagtgttatagctctattagaagccgtgggtcacggaagagaaccgtggaacccagtgactagtgttcagctcgattaggacgaacccaggcacttagccgtgcaggaacaatggcgagcatttggcccgatcgagagtggcaatgggcgcctcgctggatcaggagcacagcggataccctgatggatccggagggatggaagccagcggtgggtctcccacgggggcaaacagcagtggtggacggtgagcgaaagcgaagctcgagccgtaacaaacatggaccagaagagtgcagttgcaagatttagtagagtgaagacagagctcccatacaaagggaggggacccaaagagggtagctgttaccggctcgaatgcctgggtttatatcccgatcattgtccctcccgctgtgctctcaggtgatagatgattggctatttctttacctcctgcttttgcctaattagcattttagtgagctctctttactatctgattggtcgggtgtgagctgagttgcaagccccgtgtttaaaggtggaagtggtcaccttcccagctgggcttagggattcttagtcggcctaggaaatccagctagtcctgtctctcaattacactgagttttccaatccatgcatccaatatgtggtgtatctcttcatatgttcatagcctctgagcaatgttttacaattttctgtgtaaagaactccacatcgttttatgtttcttctaaggtatatcctgattgctttttatgtcttcacaagttttttcctttcaaaattaattttccaattgtttggtgctaatatgctcaaatgtccttgattttcttagtttgaacagtccgtttttgttttggggatttatttttttttcagattctttaagattttctatgtctataaccatataatctctgaacagagacagttttgctttttcctttcaacttgaggtaggttttctgggtagttcaggacgcgcaggcactgggtgggtggtgttagcagctgcacgatgccttggagaggacactctcgggggactgtggccgctgctcagctgtgaccgttcttatagcaccagcagctgcggccaccattcttatccaatttccaaagccacaccacaggccctctcaagaacgaggcgtggaggctatgccctctcctggacacatcatcattcccaagccccacgatgtgggccccatgggacgcacacctttgtctgtccagacctcagccccacctcctcatcctgcaccagaactcttcagagcccagtgcatgaaatgggctaccaaggaaatgagggtaggttcctgagaggaaactggccctgcatttgggagctaggagtctgctaattcgcctggcagccctgtgcagccctccgtggctacagtccaccccgtgcccatcagtgcctccttcctgtgcaagcctggacctcgccctgggctcaggatgggctgtagaccgagaatgcaggcgggaaagtctttgtctatcggggccatagtcaggttctacagtgagtcagggaaagacctgtggaggtgtggatgaggacaatgggtccaccatcaacaggaggacacgggttcgaccccttgcagaggcacagtcccacatcactgggaggcagccacactcactgcctcgccctctcctcacacagtgcagtttccacgttcacagccccagccagtcaccaggaatgccctgggggcggcctttccccagtgcactccgagccctcccttggctgtgcggtgagctccatgcccaggagatatccacccatagtcctccggaaagcagctgacctgccatgccctggaaccacaaatccccacagatcagccagcctgcagtgggccttggatgtggtgaggagtggtggcacccccgttcccaccccacagatgcaacgcctgtgggtgacgcatgtgagtactgaggagtagagggtagaactgtaggccccgagaaccacagaaactcgggtgttacactctggggccatgtaaggagaaagtgtcactggacagaaacaggcccctcctagacactgtgtgcgccatagtcacctgtcattagctctcactcttgcagattcatgattgaggtggttaaaaaaaaaaaagctcctactcacccatccaaccccatcctggggtgtttccaccacccttggggtttgggatgagctgcccttgcccactgtgctctgtggacctccctttagaagctcacagctccctgcactcggctccatcctgccccaccacacagaagcaaaacccctctcctttccactgcaggcttttcctggaccagaatgctgacctgctgcccttcactcccgaagtggtgggactgcctggggtggtgtgggtgttgagccttcttactctagggacctggcacctggccccaggggcacagggatggtgcatctgcctagggatgcctcctcatgccagggggtgggggttagtaccatcggccctcaggatttgttgcatgaatgagtgaatgggtgaataaatgaaggggatctgatctatgaataagggtatatagactttggttgatgtaggacgccaaatgctggaatttcagagtcatcacacccaggggccctgcctctgagctcctctttgcatccaatctgctgaagaacatggctctagggaaacccagttgtagacctgagggccccggctcttcaatgagccatctccgtcccggggccttatatcagcaagtgacgcacacaggcaaatgccagggtgtggtttcctgtttaaatgtagcctcccccgctgcagaactgcagagcctgctgaattctggctgaccagggcagtcaccagagctccagacaatgtctgtctccttcctcatcttcctgcccgtgctgggcctcccatggggtcagtgtcagggagatgccgtattcacagcagcattcacagactgaggggtgtttcactttgctgtttccttttgtctccaggtgtcctgtcacaggtacagctgcagcagtcaggtccaggactggtgaagccctcgcagaccctctcactcacctgtgccatctccggggacagtgtctctagcaacagtgctgcttggaactggatcaggcagtccccatcgagaggccttgagtggctgggaaggacatactacaggtccaagtggtataatgattatgcagtatctgtgaaaagtcgaataaccatcaacccagacacatccaagaaccagttctccctgcagctgaactctgtgactcccgaggacacggctgtgtattactgtgcaagagacacagtgaggggaagtcagtgtgagcccagacacaaacctccctgcagggatgctcaggaccccagaaggcacccagcactaccagcgcagggcccagaccaggagcaggtgtggagttaagcaaaaatggaacttcttgctgtgtcttaaactgttgttgttttttttttttttttggctcagcaacagagatcatagaaaaccctttttcatatttttgaaatctgttcttagtctaatggagattctctaatatgtgacaatgtttttctcttgctgtttttggaattctttgtctttgacttttgacaacttgacttttgacagtgtgcctcaaagaagttctattttgggttctgtgaacctcctggatctgggaagttttcagctatgatttcattaaacgtgttttctacaccatttccctactcttttggaatacccataatgcaaatatttgttcacttaattgtgtcccataaatgctggggattttcttcattcctttttactctttttttctttttattcatctgcctgaattatttcaaaagatctgtcttcaacttcagaaactcttttgcttggcctagtctaatcttgaaggtctcaattgtacttttaatttcattcattgaattcttcaactctggaatttctgttggttcttttttatgatacttatctctttgttgaattcctcattcaaatgataaattgttttcctgatttcactgaattttctatctgtacactattgtatctccctgagtttcttagagattatccttttgaattatttttctgacattctgtatatttccttatgattggggtctgctactggagaatgactgttgtctttttcaggtgtcgtgtttcctggccttttcatgttttatgtgttcctacgttgatttctacacatctggcggaccagtcatcccttgcaatttaatggagtaggttttgcaggaaaagacttcctagtacagacgggtctcagggtgtcagtgtggcggggcgtgctggctttagttctaggttgacgcagtagcgtagtctccatgtcgtttcttcagctgccgtccacattggtgacgtttgcgagtgtctcagtggcctgggctgagaggtttgtggcagtggaagtgcaacgttgctagaggtggactcaccaggctgtttctgaggtcgaggcacatgcatgcacatggtggattgaccaacttggtgccaggctcactagggttggggacatggggctgtttctcaggcccaggatgcaaacacaagtctctttggctggcctgggggtgtggcttctgagggcaatccacagggctgtttctcaggttcaggacacaagtgcatggccgctcaactggcctgggcatgtgtctcccagggccaccccatgggctctttctcagacccaggacatggccacatggcttcctcagctggcctgggtgtgtgtctgctggggggctgcaggggcacagggttatttctcaggccggggtcatgggcgcacagctgcttgctggcttataggagtgcctgccaggggtggcccatgatgctgtttctcaggcctaatttcaggtgcagagcctttgggcaggtcaacggcatacctgtggaaattggagtggatgccacagggctatttctcaggtgcctgagtgtgggcacatatccactctgccagcctggagttagtatcaggtgctcggtggctcaggggcctctcctgctcaggggagggccctcagcagcttggccaaatcaatggtggattcaccctgggcaggcctggcaggctcttcctccagctggatgtgcagcagcaggggttgggttttttgctgtgcagggccagagtcacggccaatcctcagcctaggctctgcacagccagggttgtggcattcagccacccagatatgggcatcctgaagatggagccccaatgctagaaaggggcagtggctaccagcctcagggcaggatgcactccagaggcggctccggtctcaaggtggcgctgggctgcagcagctaggctcacagtggatgaatgggggcagggagtacacaccttgtgctcctaatctgggatcattcctggcagctcccaaccgcggatcctctccctatagtgagtcgtattagcggcc

SEQ ID NO: 10 - DNA, 202662 bp, synthetic construct
  misc_feature 1..202662: note = Annabel
  variation 151214..151343: note = n is a, c, g or t
  variation 183232..183281: note = n is a, c, g or t
  variation 194855..195259: note = n is a, c, g or t
  variation 198416..198423: note = n is a, c, g or t
  source 1..202662: mol_type = other DNA
ggccgcctcccatgattccaacactgagttcagacttgtcacatggaacttatctttgcatgtttgtggcacagacagatggacccaaccatggattagtggatggatggatggatggatggatggatggatggatggatggatggatagatggatggatggatggctgagtaggtgtgtggatggaagagtgaaaagatagatggatgcatgtatgggtggatgggtaggttgatggatgcatggatgggtggatggatgggtgagtggatgaatgggtgggtaggtgggtggctacatgcatggatgagtacttggatagataagtgagtggatggatggatggatggatgaatgggtatgtgaagggatggatgtattagagtgggtagttaggcaggcatgagctgatagtcaagtgattgttaaactgcctctctaaaataataattggtctcggctggacgcggtggctcatgtctgtaatcccaacactttgggaggctgaggtgggcggatcacaaggtcaagagattgagaccatcctgaccaacatggtgaaaccctgtctttactaaaaatacaaaaattagctgggcgtggtggcgtgcatctatagttccagctactcgggaggctgaggcaggagaattgcttgaacctgggaggaagaggctgcagtgagctgagattgtgccactgcactccagcctggtgacagagcaaagctctgtctcaaataataataataataataaataataattgatctcagccagcgccaagaaaaggcagtctcccaatagatagaaaacacccgaaactggtcatcagcagcttcctgataagatctcaggcattgggtgagtgggctcaagcatatgcactaagaggcaaagtggcagagtttaactggcacataatcttcctctaggaacactctaatagtaagagaaggacacctcaaatgagcatgtgcacatttcattaaacccactgtgtatgcagcccctcccaagtgctggcaggccactgtacatgtgggcagcccactccaagggaagaatcaagggagaagaaatacaaatcccagaaccatgtcaatgtataaaaccccaagtcaagggccggacagagcacttagatctctcaagtcgcccacttagccctcttccaagtgtactttacttcctttagttcccactttaaaactttaataaacatttactcctgctctaaaacttgcttgggtctctcactcttctgtatgccccttggccaaattctttcctccaaggaggcgagaatcaagttgctgcagacctgtatggattcgctcctgctaacagatagctggatgggtggacagatgcatgaattagtggatggacgtttggatgtgtgggtgggtgggtggattgtgggatggctggatgaatgcatggctggatgggtggacagatgcatgaattagtggatggatgtttggatgtgtgagtgggtgggtggattgtgggatggctggatgaatgcatggctggatgggtggacagatgcatgaattcgtggatggacgtttggatgtgtgggtgggtgggtggattgtgggatggctggatgaatgcatggctggatgggtggacagatgcatgaattcgtggatggacgtttggatgtgtgggtgggtgggtggattgtgggatggctggatgaatgcatggctggatgggtggacagatgcatgaattcgtggatggacgtttggatgtgtgggtgggtgggtggattgtgggatggctggatgaatgcatggctgggtgggtggatggatgcatggataagtggtggacggatggacgggtgagtggatgggtggatgtgtgtgtggatgggtggataggaaagccctctaattgattacagggctcagtgtgtgcttcaacatcatgatggcatcatcacattggtccctgtatgaagcagtgggggaggagagtgtaccaggggagcaggaatgacttttctccagaatcgacctctcccaccctgcagcctgggctgtgcaggccacattggagaaggtgcggtcgactactcctaaatgttgttgtgtccaatggcttgttgacgttgatgtaggaatgagcctacatctccaccatagatggaactgtttgggtccccaaagcagaaagcctcttctgttgcaggtgctgaagtttccatcttcttctgcttatacggaagctcacgcatcccttggatggcaggcgtcaggttcctgtgcgcactgagttccccccttacatgctttggacagaagtgtgagacacacaagattgctgcaggaagtccacctgtggggatgctgcgacttctccagcaagaacacgagtctgctcattgaccatcaccacacataacaaattaagtgtcccttttttgataacacgtcattgtttcacagagtattcttttaaagtgtataagttgactgcagttattattttttacttctgttactaatttactcataattaggcacaatttacacttaagaaatttcttaatagttttttcctccttaaggtgaactacagtcagataacatacttatcaattgtctctagctcttgtcagaaaaacatatagatgtgtgtgtgcgtgtgtcttggcctttccaatgatgaattaagatgtgcattgagaaggcattcactttatttgacgttaaggaagtaccaagaagacgctctccacagaccctgggaaagccagcagctgcaccccgaggctgtgccaggcagggaacaaggaggcagcaccacctgctgggcagggaaaatgtcctcccagtccctgccgcttctctgcagaggcacaaagagctgccccttctcctgggccttctcctgggctgatgagattgctccccgatatgccaaatcagggttgtgcatctgaggctctgtctagactctcagctccttcctactcctgcaaagtgaagaaaacaatgccaaggggtcctggaggcgtctctacccctggagagttttgactctcttcaatagtctccactaccctgccctcactccatgtcctccgtttctccctaaagcggtgcccagtctgattgcactgtggcagggataacgaggggccaggacatcaggggagagaagtttctacctgagtcacagcagcggctgccctgcagactcctgaagacacaagacacatttccatcccagagacccagcgaaatgcaacctcaggctagagacagccagttattttttcttgttctgtcctggagaggccactgagaaagtcgagccccttgttgaggaaaacatgagatctctgtgtgtcgtcctctgcctgatggctgtacctccatgtgagtgtctcagagatttcagaacgggggctgtgggctgtggtgtccgcttgtgactcatctctttgcttcttgtccctgagtgtcctgcatcagatgcagctactggagtcatgcccagggctggtgaggtcctcacagacctctgggcctggacccagcagccctctgggaaggcgctggggcacctcagctccaggggcagcacacacttcagcccagcctttctgggccaactctccatctgtagagacacatccaaggcccagttatccctgcagctgagctccgtgatggccaagggcagggccgcacattcccgtgggagacagaatggggacctcagcgtgagcccagacacaaacctccctgcagggaagcacaagaccaccaggcggcgctccagaccacacagcggccccagaagcaggttttagggggcggggcagacgtgtccgcgttgagtcaggtcattggttttactttccctgagcaaacggcctctgccaaggactcactgcacctctcaccttcacagttgttttttttttttttttaatcaccctgtagagttttgctagctaatttagatattgaggagtgcttcatacttccttgggcctctgcttgcagaaacatagcaattgtaaggaggcacgtgggaaagccccggctcggtgacccgggggatgctgctgtggccctggcaagagggcgtcgggccgcagtaacaaaggtgcagacggctctcagcctgcgcccgcggagtacaacacataagggctgtaacctaacgaaaaaagaatcgcagtgcaactgtcctgcatttgagtttgtgatcagttttgccctttgtctttaacaggttctaacataaaattttgaatgttggttcaagccctgtgggtaaaatgcacttacccacattccttaaacaaatagaacactgaggtggaaatgttttgaaaaagtagttttcagacatttggaaacaagcatcacaggatcataacccctgagaaaagaaaaacaaatgaacgaatcctgctattgcctgaaagcagctgccaggacacacggaaaggcttagtgagctgagcggacagagagcagagttcaaggcagcagcagcccgaggggaggagcaccggggagcaggctgctgtgcagccaggatgggccggggtggggcggggggagaacagctggagacttgccgcagggagggggatccctcaggtttggggctgagaactgacttatgcctgacttatgcctgcatgaaaagaaactactcgatatcagggggaaatcaccagaaacctgtggacccaaaactacacagagcctacacaaggaaagcattgtttgtgttctcccagccagggtggaaagaccttgagatatgtaaagcttcaagcaatcttccgaagtaatctcgtgagtagtggtgccacattaattcaggactaaaggctgctctgaactgaacctaagaaatgcttcaagtgtagcctggagcccgggtgcagtggctcacacctgtaatcccagcactgtgggaggccgaggcaggcggatcacttgaggtcaggactttgagaccagcctggccaacatggcaaaacctgtctctactaaaaacacaaaaattagctgggcgtggtggcagatgcctgtaatcacctcccacctggacccttccttgatacatcagaattacaactagagatgagattggggtggggacacagagccaaaccgtatcacataggaacctaaaaggataataaagtaggaaaacttcccacatcagtaaccctttatccgatagtaatcccaatctgcaaagtaaaactgtgtgattttactaagataacggaatcttctctacagaaggactttccagtgcaaaagctccccaccctcaccatgaaatgcacgtgaccatttccaatttgtgtaaagtcctcagttagtactgagacttcggaaggttagaaatccctttgctcatgctgcatggtccggatgagatgtaagaatcattagctaatagacatgcaacagcttttgtgtgaaagatgttatgagacatttaaggtatttgcttgtgattactaagcattcattgtatcattggagcacatgtgcttttataccctggagaaattccagtaattgaattgctgggttgaatgggattttgatttggattaaatttaaactatagattttatttagggaaaactggcatcttaattatgttattggggggcccttgctcccagagctcccaagatggtggcaggccgcttccaaaatgaccgcaggccacttccaagatggtggcaagcctcatgttctctgacctggggttcttggcctcacggattccaaggaatggaagcttgggccatgcagtgagtgttatagctctattagaagccgtgggtcacggaagagaaccgtggaacccagtgactagtgttcagctcgattaggacgaacccaggcacttagccgtgcaggaacaatggcgagcatttggcccgatcgagagtggcaatgggcgcctcgctggatcaggagcacagcggataccctgatggatccggagggatggaagccagcggtgggtctcccacgggggcaaacagcagtggtggacggtgagcgaaagcgaagctcgagccgtaacaaacatggaccagaagagtgcagttgcaagatttagtagagtgaagacagagctcccatacaaagggaggggacccaaagagggtagctgttaccggctcgaatgcctgggtttatatcccgatcattgtccctcccgctgtgctctcaggtgatagatgattggctatttctttacctcctgcttttgcctaattagcattttagtgagctctctttactatctgattggtcgggtgtgagctgagttgcaagccccgtgtttaaaggtggaagtggtcaccttcccagctgggcttagggattcttagtcggcctaggaaatccagctagtcctgtctctcaattacactgagttttccaatccatgcatccaatatgtggtgtatctcttcatatgttcatagcctctgagcaatgttttacaattttctgtgtaaagaactccacatcgttttatgtttcttctaaggtatatcctgattgctttttatgtcttcacaagttttttcctttcaaaattaattttccaattgtttggtgctaatatgctcaaatgtccttgattttcttagtttgaacagtccgtttttgttttggggatttatttttttttcagattctttaagattttctatgtctataaccatataatctctgaacagagacagttttgctttttcctttcaacttgaggtaggttttctgggtagttcaggacgcgcaggcactgggtgggtggtgttagcagctgcacgatgccttggagaggacactctcgggggactgtggccgctgctcagctgtgaccgttcttatagcaccagcagctgcggccaccattcttatccaatttccaaagccacaccacaggccctctcaagaacgaggcgtggaggctatgccctctcctggacacatcatcattcccaagccccacgatgtgggccccatgggacgcacacctttgtctgtccagacctcagccccacctcctcatcctgcaccagaactcttcagagcccagtgcatgaaatgggctaccaaggaaatgagggtaggttcctgagaggaaactggccctgcatttgggagctaggagtctgctaattcgcctggcagccctgtgcagccctccgtggctacagtccaccccgtgcccatcagtgcctccttcctgtgcaagcctggacctcgccctgggctcaggatgggctgtagaccgagaatgcaggcgggaaagtctttgtctatcggggccatagtcaggttctacagtgagtcagggaaagacctgtggaggtgtggatgaggacaatgggtccaccatcaacaggaggacacgggttcgaccccttgcagaggcacagtcccacatcactgggaggcagccacactcactgcctcgccctctcctcacacagtgcagtttccacgttcacagccccagccagtcaccaggaatgccctgggggcggcctttccccagtgcactccgagccctcccttggctgtgcggtgagctccatgcccaggagatatccacccatagtcctccggaaagcagctgacctgccatgccctggaaccacaaatccccacagatcagccagcctgcagtgggccttggatgtggtgaggagtggtggcacccccgttcccaccccacagatgcaacgcctgtgggtgacgcatgtgagtactgaggagtagagggtagaactgtaggccccgagaaccacagaaactcgggtgttacactctggggccatgtaaggagaaagtgtcactggacagaaacaggcccctcctagacactgtgtgcgccatagtcacctgtcattagctctcactcttgcagattcatgattgaggtggttaaaaaaaaaaaagctcctactcacccatccaaccccatcctggggtgtttccaccacccttggggtttgggatgagctgcccttgcccactgtgctctgtggacctccctttagaagctcacagctccctgcactcggctccatcctgccccaccacacagaagcaaaacccctctcctttccactgcaggcttttcctggaccagaatgctgacctgctgcccttcactcccgaagtggtgggactgcctggggtggtgtgggtgttgagccttcttactctagggacctggcacctggccccaggggcacagggatggtgcatctgcctagggatgcctcctcatgccagggggtgggggttagtaccatcggccctcaggatttgttgcatgaatgagtgaatgggtgaataaatgaaggggatctgatctatgaataagggtatatagactttggttgatgtaggacgccaaatgctggaatttcagagtcatcacacccaggggccctgcctctgagctcctctttgcatccaatctgctgaagaacatggctctagggaaacccagttgtagacctgagggccccggctcttcaatgagccatctccgtcccggggccttatatcagcaagtgacgcacacaggcaaatgccagggtgtggtttcctgtttaaatgtagcctcccccgctgcagaactgcagagcctgctgaattctggctgaccagggcagtcaccagagctccagacaatgtctgtctccttcctcatcttcctgcccgtgctgggcctcccatggggtcagtgtcagggagatgccgtattcacagcagcattcacagactgaggggtgtttcactttgctgtttccttttgtctccaggtgtcctgtcacaggtacagctgcagcagtcaggtccaggactggtgaagccctcgcagaccctctcactcacctgtgccatctccggggacagtgtctctagcaacagtgctgcttggaactggatcaggcagtccccatcgagaggccttgagtggctgggaaggacatactacaggtccaagtggtataatgattatgcagtatctgtgaaaagtcgaataaccatcaacccagacacatccaagaaccagttctccctgcagctgaactctgtgactcccgaggacacggctgtgtattactgtgcaagagacacagtgaggggaagtcagtgtgagcccagacacaaacctccctgcagggatgctcaggaccccagaaggcacccagcactaccagcgcagggcccagaccaggagcaggtgtggagttaagcaaaaatggaacttcttgctgtgtcttaaactgttgttgttttttttttttttttggctcagcaacagagatcatagaaaaccctttttcatatttttgaaatctgttcttagtctaatggagattctctaatatgtgacaatgtttttctcttgctgtttttggaattctttgtctttgacttttgacaacttgacttttgacagtgtgcctcaaagaagttctattttgggttctgtgaacctcctggatctgggaagttttcagctatgatttcattaaacgtgttttctacaccatttccctactcttttggaatacccataatgcaaatatttgttcacttaattgtgtcccataaatgctggggattttcttcattcctttttactctttttttctttttattcatctgcctgaattatttcaaaagatctgtcttcaacttcagaaactcttttgcttggcctagtctaatcttgaaggtctcaattgtacttttaatttcattcattgaattcttcaactctggaatttctgttggttcttttttatgatacttatctctttgttgaattcctcattcaaatgataaattgttttcctgatttcactgaattttctatctgtacactattgtatctccctgagtttcttagagattatccttttgaattatttttctgacattctgtatatttccttatgattggggtctgctactggagaatgactgttgtctttttcaggtgtcgtgtttcctggccttttcatgttttatgtgttcctacgttgatttctacacatctggcggaccagtcatcccttgcaatttaatggagtaggttttgcaggaaaagacttcctagtacagacgggtctcagggtgtcagtgtggcggggcgtgctggctttagttctaggttgacgcagtagcgtagtctccatgtcgtttcttcagctgccgtccacattggtgacgtttgcgagtgtctcagtggcctgggctgagaggtttgtggcagtggaagtgcaacgttgctagaggtggactcaccaggctgtttctgaggtcgaggcacatgcatgcacatggtggattgaccaacttggtgccaggctcactagggttggggacatggggctgtttctcaggcccaggatgcaaacacaagtctctttggctggcctgggggtgtggcttctgagggcaatccacagggctgtttctcaggttcaggacacaagtgcatggccgctcaactggcctgggcatgtgtctcccagggccaccccatgggctctttctcagacccaggacatggccacatggcttcctcagctggcctgggtgtgtgtctgctggggggctgcaggggcacagggttatttctcaggccggggtcatgggcgcacagctgcttgctggcttataggagtgcctgccaggggtggcccatgatgctgtttctcaggcctaatttcaggtgcagagcctttgggcaggtcaacggcatacctgtggaaattggagtggatgccacagggctatttctcaggtgcctgagtgtgggcacatatccactctgccagcctggagttagtatcaggtgctcggtggctcaggggcctctcctgctcaggggagggccctcagcagcttggccaaatcaatggtggattcaccctgggcaggcctggcaggctcttcctccagctggatgtgcagcagcaggggttgggttttttgctgtgcagggccagagtcacggccaatcctcagcctaggctctgcacagccagggttgtggcattcagccacccagatatgggcatcctgaagatggagccccaatgctagaaaggggcagtggctaccagcctcagggcaggatgcactccagaggcggctccggtctcaaggtggcgctgggctgcagcagctaggctcacagtggatgaatgggggcagggagtacacaccttgtgctcctaatctgggatcattcctggcagctcccaaacttggctgagggcttgcaaaacctgtggaattctcctgttgcaagggctgtagatgtttgcagtggcagtgggtgctggcgggaaatctgcttaccttttccctacatgggaagtccctcctgtgtccagaccaatccgatctgggtggggaagacaaggctgcaaaggccaggtgcctccatgctgccctccgatcaccacgggtgcgtttccacacctccactgcactccgtcagtctcccttcaacactccagtcaaaccttagctgtttcttctttgccttattccttcctcatggggagggtgtgggtgaacaccaggcttctctaagttcttcatccatcttgctgatgtcattctccatccaggcatgggtttttaagaagtagtgaatactgaaatttcagcagaggacacctctataaaaattctgcaactggaaaacctccttaaattggctgattgtcattacaattggaggaaaactgccaataatttcaaatttagaaggctgagactctataaacaaagactaacaatatgttttctgatatttttccccaaaataatacttttccaagacgaaaatttttccagggtatataagcacatgtgctccaatgatacaacaaatacttactaatcataagcaaataccttaaatgtcttataacatctttcacacaaaagctgttgcatgtctattagctaaaaattcttatgtctcgtccagatcatgcagcatgagcaaagggatttttgaccttcaaaagtctcagtactaactgaggactttacacaaattggaaatggtcacctgcatttcatggtggtggtggggagcttttgcactggaaaatccttctgtagagaagattccattatcttggtaaaattacatagttttattttgcagattgggattaccaactgataaagggttactgatgtggaagttttcctactttattctcctattaggttcctatgtgatatggtttggctctgtgtccccaccccaatctcatctccaattgtaattcccatgtgtccagggagggtccaggtgggagtgattagatcaagggtggtttttcccaggctgttttcatgatagggtgttatcatgagatatgatggtttaaaagtggcaggttcccctgctctctctctcgcctgctgccacataagacgtgccttgctttcccttcaccttctgccatgattgtaagtttcctgaggcctccccagccatgcggaactatgagtcaattaaacctcctctctttataaattacccagtctcaggtagtatctttatagcggtgtgaaaatggactaatacactatggctttgaattaataatttaaaatttgtcagcttggcaataaaacatcctgttgacatttattttttaggtaatattttaaattggcagtttcattcatgtttttacaaattcttattttcagggtgtttaaggcctttgctttgaacttggtggttccttacactccatgctgttagtgaagagggaccaggttgggaggcattggtttgggtggtggtcaggaagggcagagtgatttgagtagggtctgagtggataatagctcatcagtttggaatttataaatgaccagggatgatttaaggagattcctgccagacacctatgccatggccatgccctatctggatctccagccgtgagatgagaacccagccatgcgggggagtctgttcgttctgctcaatgttgtaagtggcacatgctattggataatgtagaattgaatggatatcattttattattataatttacaaacttcctacaataaacttatcacctttatacatagaaacaaatataagtacattttccctcccctatgtcattttgagccctctctccaaaccatcctcccactctgcgactcactgtcctgcatttggctatgctctggcaagtcctgcttagacaagcactcaccagaccacctactcagcctcccttcagcgcccacctggcccacctgctcaaatacatgttgagtggtcacacacatggactgaacaccatctattccatgcactgccccagtgaccgcactgagcagcaagagagaaatgatcgcattagctatcaattatgccaattcaaatgctggagtctttctcagatacttttcaatgttcaagaattgttgattgtgaattctatacccaatgaaactatccttcagaaatgagcagaaaatggataccttctcaaataaacaaaaactaaaagaattcttgctacaagatgtactcttaaagactggctaaaggaagttcttcaaacagcaaggaaattgaattgatcttatgtcctgcacacttgctaaatttcctctcaattttagcagcactgtttagattccataggattttccatacaaacagtcatgtggtctatatatagagacagattttcctcttttccagtggggataaatttatgtctttttctttctgtgttacagcaggtaggacctccagtacaatgttaaacagaagtggtgaaaacagacattcttgcctgtttcctaacgttggagtttggtcttttactatggtgtcagatgttagctgtagggtttttataaatgcccttcatcacattgaggaagtttgctcctatgcctaattttctgagagtcttttaatgtgacactcatgctagaatttattaaatgctttctgtctactaagatgattatgcagttcttatattaacatgaataattacatttatttattctttaatatcaaggcaattttgcattcctgagacaaaccccatttagtcatcatgtgttgttattgttacatattgttggattcaatttcctcaaaatttgttaagaattgttacatctatgtttacaaggaagattagtctgtagggtattttttcttataataactttgcctagttttgcaatcagggtaatgctggactcacagaatgagttgggaagctatttcctcctcttcatttttctgaaagaatttgtataaaattggaattatatcttccttaaaggtttgcaagatttcataatgaagtcattggcctagagttttctttgtgggaaagtctttgtttgtttgttttgtggtttgggtttttttttaagagacacagtctcactctgttgcccaggctggaatgcagtggtgtaatcatagctcacagcagcctcaacctcctgggctcaagcaatcctcctacctcagccttcagagtagctgggactacgggcatgtaccaccacacccagctgtttgtttgtttgtttatcgctttgtcttgtttttgaggtcttattatgttgcccaggctggtcttgaactcctggcctcaagtaatcctcatgcctcagcctcccacagtgctggaattacaggcatgagccactgcacacagactgtgggaaagtttttaactaaaaattcaattttctcttccttttccagtgagctttccagtgtctttcaattaatgtatctattttatctaagttgttgaatttattgtcaaaatttttttaaacaatattcctctcttagaggttgaacatctgtagaatctgtagtgatggcacctcttaaatccctgatcttgctcatctgtgtcgtctctctttctctaatcagtatgcctaaagtttaatttcattgattttcttaaaaaactggttttggttttattgatttttttccctagttttttgtgttacatttcattgacttctgctctgatatttactatttcctttctactgcctacagtaagtttaatttgctattttcttagtttcctaaagtggaagctaagtttattgacttgaggcctttcctctgtctggatgcggatatttgctgctaaacatttccctccaacaccatgctgtgagttttagttacagcgggcttggagttggcctgagaaattctacttaaacagctgcacctatcatgtaagtgataaatgatgtacctgcctggccctcacccctggtcaaagaatgggatgtactaatgagcaatgttgctgcgtagctgtggatttcaaggtattttctgtgtggttttatcatcagcattgtttgttgatgactgcaagactgatgatttgcacctggcctcggtgagatccccgaaagaccctgcagatgggctggttacttagcagaaaatatgacaacgtggccagcaggaaacaggaaggtacaatcggctgcaggtgagctgttggaagtaagttccaattttcctattttgtatttgcattttaatagtgagactgcgcttatgttatttgtgtgaaacagctttattcatagcactgtaatttaaagagaaaacccattcatgggaacaacaaacgacctagacaccaaggtagctcatgccatccaaggctatactgtgcagtgattgggaaaatgggcactggtcccagaagtctgatcgacactctgccactggctagtcccgtgctggggggcgaggatccacactctgccactggttagtcccatgctggggacaagtatccacactctgccactggctagtcccgtgctggggggcgaggatccacactctgccactggttagtcccatgctggggacaagtatccacactctgccactggctagtcccgtgctggggggcaaggatccacactctgccactgattagtgttgtgaagatttaaataaagaacccacaccatattctttgacttgtgctttccgtatactgagagatagtaagagtacattattattatttataaagtaaactagaaagcacatgggaagacaagaagaaaacctgaataaacatgaattaccccattttcctcaggagaaaactttcacactctgaaggtacacaaattagcctacaaatttaatgtaaagcaaatagactgttgtaggtaccaattctcaatgtcacagtgttacatggaaagtaaaatacacaagaacagcccaaaagatggaaacaatggacgtggtcaaatgacatcagtacaacatccatatggtcctaagtagccatctttaaaatgggttagaaatgccttcaatcattcacacagacacatgcattgaacaaactctaagaagtgttcttacacgggaaaagcaagttacagatgcatgggcatgatatggatgtagatgtgtgtatgtgcatcccactcatacacaaaatacccagcatcgcccacatgcctgctgtgtgcgtaagtgtgagcgagtgcacagacaacagcgtgcagaaattcaaaccaagctgtgggtacttgttaccactgggaagggagtcggtcacagagggaaagagaaacaggacatcagcctttgacttcagaactgttcctgccttttcacatcctgtgctgttttcagcatcatcggagcccttaacacacatcacgggagtaagagtgtgttagagggagcattcggtgggacagatattgccatggcttgtggatagagttcacagtccttaataatccccgagatggcagccaagagctacgttctcaatcacgcagcttcaccccagaaactgacagaaacccaacaaccaaaaggtgtccattctgacagcctcagcctgtgctggctcagatgagcaaaaatgtacagatattaataatgatgttgatttgaagagcacagaggggggtatgcatgataagggtccaaatttttaccttaaaaaagaatacatttacttctcaatcacctacataacgatcattttttaaaaaactgatcaaatttggtgttacaagggcacgttgcaaattcttctggctacttttctctgactattctaattacgttaccgtgttttctcctgtatgtgcccgttcatgtgaatgtcatttctggctacttttctctgactattctaattacgttaccgtgttttctcctgtatgtgcccgttcatgtgaatgtcatttctggctacttttctctgactattctaattacattaccgtgttttcctgtatgtgcccgttcatgtgaatgtcatttctggctacttttctctgactattctaattacgttaccatggtttctcctatatgtgcccgttcatgtgaatgtcatttctggctacttttctctgactattctaattacgttaccgtgttttctcctgtatgtgcccgttcatgtgaatgtcatttctggctacttttctctgactattctaattacattaccgtgttttcctgtatgtgcccgttcatgtgaatgtcatccaggcagatttcccaaatccggcttcctgtaaccaagggctgaaagagggaacggtttcctgggaatcctttttgcagtttattttacccggaggcagaagcccacggttccgtgaagagtctattgctctcccctctctccttttgtgtctctatttttaattgacaaaaaagcaaatgtgaagattcctggggtacaatgcaaagtgacaatgcctgtctatattgtgggatgattaaaacaaggtaagtggcatatccatcacctcacacacttatcattttgtggtgagaacatttaaaatctcatcttttagcaattttgaaatagtcattattgttaactatagtcaccatgctgtgcaacagatcaaaagaactgactcctcccatcagcagaaacttcatgccctttgaccagcatctctcctttccccgtccacgactaacccccagcccaagagaacagccaacacccacctcgctgctgccacacgacatgtcgggctttgatgggatggaggtgagggtggggaagacaattccaaagctggagcactggcctcacagctcagacactcttctacttatcctgagagaatgatgtgctgagaccaactaaacctcccctgctcttcccacatggcagaaaagaggcaacccagggaagccattgccaggacatcatggtcacccaacccttgtgcagaaaggaagcacctgcccaggatgccatagcacccaaccctcatccccaaggaaacacagcccagggcaccatggacacccaaccgtcatccccaggggaggacacagcccagggcaccatggacacccaaccctcatccccaggggaggacacagcccagggtatcttggacacccagccctcattcctaggggagtacacagcccagggcatcttggacatccaaccctcatccccagggaaggacacagcccagggcatcttggacacccaaccctcattcccataagagcacacagcccagggcatcgtggaggcccgaccctcatccctaggggaggacacagcccagggcaccatggacacccaaccctcatccccaggggaagacacaacccaggccaccattaacacccaatcatgtgcagggagggtgtccttggagcctgggactcttgccagtgaagcggtggacaagaaactgaggatgcgatcagcacacagaaatctcaggcagcctaggatacatgaggcctctcacccctgggaacactgagcagccaccaggagcccacaccttgaggtacagcaggagccatgcgctcttgctcttgctcactcacactcctgcacacagccactgacacacgccctcgtgcacgttgcagattaactccactggccttgcacttgcaacgctggaggctgagaggtatccccaggttcttttctcgtgagaggggcaggctgactttcactctcctccatgtgctagaggcagctccaccaacactggctgccctgagtggatgcacctggctctggaattcctgtcatttgctttggatccaggagcccctgcctcatgtagctacttaacagaaaggaggaatccacccaggacatgcccagacgggagcctcacaggatggacagtggtgtctggggtcacgggcagccctgacccagcagcgccagcaccagcacacccagtggggaaggcggggaggcccaaacgccacccacagtttgttactccactgggtgggacccggcacccctgccttcctgacaccctggagtccctgcctcctcctagagcccccaagcccatctgcctcagagcatccagagacagacctggggagccatttcctcaggccctggacaaggaaacagggaattccaggttatgggtgcctggggcaggtctcaggcaggtgctgggaaccagagagaggggtcaccgcgaggcctcaggcctggcaccagcactttgagcctcagtttaccagcccacgaggtgctgagtctggactggatgaccttcccacccccagtgacctctgccctttcccgagcatgtcagctctgctccagcatcctggtgtgagcgcaatgccactttttttctcaacaaatacgaaaggaggaaggtgcccccagggccctgtgccctgaggatgcctgtgtggaggggtccatttcatcactggtgtcactcacaggaagggacgaagccacctgccttgacggagcttactccacctccgccgaaggccggggaggtccctcacagagaacctgaggcccagcaggctgcagaggtgctggcatggaatgactgctcagacgcccggggccggcagagaggacggatgtgggggaggtgcacactgaggagcctctccttggaggtggagacacgtgcaccacatggaccaggacacagtccacgaagcctcgcatccccctgagctgcagctcaagggcctctctctgagcccagagtcccacccctgggaggcagctgccccagctctgagggaggagggcatccaccaggccctccatctcctgggggcaccagcccagcccagaggctctgcaggactctgcacctccaattcatggccaggactttctggatgtatcttaaggactgaggactccacatcagggaccacacaagaccggggtcccggacacgggggttgggggtgagcatgtcaccgggatgggctgtggcgtcactctggtacttcatccggacagccagggaccaaagccacgccctcagccccaccccacccctgcctcacatggcaacgcagggtctgcagatgcaggagagtgagaagcatggtagccaggcagactagaggacccgagctggggttgagcacctccctgtctacccagggcatggcctgtgagactgcaggtggcctagtgtgtgctgcaggctcaaggtcctgccccagggagcatgacattcaggcccagaaattgcatcgtgctgcacacagtccaaggggataaccctgtgaagttcaggtcaccagcaggcttggggtcaagaccgagctgcagaggacaggtttctggaaggcacagcatcatgggtggagggacttggagcaaggtccttagccccgggaccagtgaatgtgtgcccttatagggaaagggggtctgtgcagaagcaagttagctgaaaatcatgaagtggagaggctcccctggattaaaggggtgagccctaatgtaatcacaagtgtccttctaggaggttggcagagggagactgacatagacagaagccaggtgaggtgggaagcggaggcagaggccgagagagcagacgctacgccctggccctgaagacggaggaggagccgagagctcagggatggagagactggaggaggcagggaagttctccccgcaagcctggagggagcatggcctccagcacccccagaccttggccctgcaggattcatctggacctgtggtataaatggtgtttaagccactgggctgtgcaaattgtcatagcagccatggcgcattcctagagggagccctggtggggacccagcaggcagcgacggggccctcacaagcctgtgagccactcagagccgcgagagtggctaggcttggtgaggtgcaggccacgcgcacctccactaaggcagccttagggcccacacatcctctctctctctctctctctctctctctatctctctccctccctccttccctccctcccgctctcttggttggacagctctccatcatccccctggacacgaccacctcccaaggccgagctggggcgctttgctcgaggtgagcactgacatcctgggggtgtgaggggcacctgcccagcggccccgtgtgcaggatgggcggtgggccctagctggcactgggcatatggcccggctggtgcctgcaggctgcagcttttctggggtggctgggatcagtgaaggcctccagagtctgggcctgggatccctgcagtgctggctgaggacaggcggggctgggcagtgagggcactgggtcactatcaccacccacggtttattacttcactaggtgggacctggcacccctgccttcctgacaccctggaatccctgcctcctcctacagcccccaagcccatctccctcagagcctccagagacagacctggggaggcatttcttctgcccccagcagaagcccgggaggccgggaaggcacagtgggtctaaaggagaggatcccaggactgcctgaggggtgactccgacgaggcaagcatagagcccactgagaagcggggtgggagccccaccagggatgggctagttcctcatgaaggaccaggacccaggaaggacaagggggcctgctggggcagggtctgctatgccggagtccctgtgagcctggcccagacctgcctctctctttcctcattggtccccacaggtccgtggtggttgccgtatcgggaggccccatggtggcaggggtgggacacctggtatacgtcgccaggtgtgtccaataggctcatgctcacaccttctcctggcacctgggcaaagcctgagcacccaggcactgaagtgagggcaaggcctcggggccccacaggatggccgaggagacagctgcagggcgcctgggacccctgggctcaggaggtagaaggatacagcctgaaaacccacaccacaagctcaccggccagtgcaggcccacagagctcgaggaggcagccctgagcctcccagggagagatgctctgtgcacgccggcacaggccctgggttacaaaccctaggcacagcccaggagaggcccaggccccagtccagcaaggggttgcaggaagcaagaggtccccggccacagcatgagataagcccatcaagccagggccaggtgggcaatgggaggcaggcagggcttgggggtgagtccctgctgcagcgccgtccactgtcgaccggaggagtttcttccctgtgcggagtccacgggcctcctgtgagtgtgtgcatgggcacaagtgtgtgtgtggctctgctgtgtgtctgtacacacgtatgttttgggtttttttgtgtctcagaccacagagtctgcccctcccaccaaagcccaggcagaaggatgaacccacgcccctggggcccaggcctcagcagcctctgcaggatcattgttcccagttgtcacttgcctttgccacagccctatttctccacaattccttaaagtcctcaacatgcatttaaggcacaaaggtgaaactgcccagaaacatctgactccgccgtggaacccaggagcaagctgggttagctaaggagcggggccgttggcagaggctggggatccaggctgaactttggaggaggcatgtgccagcatgggctcctgactatgtcctcctgggacaaacccaaacccactctttgaatatgggagggactttgctggccccggccctgaccgcagcacttggaaactgaggagtggtcgcctcctccgtgtcacagctgcccgttcaccatcatagaagcaactctgtcacctccatgggcccctctgtggctgctgcctgggtccaagctgagcccagctgcccaggcccagaaggaaagcccaggccaggtgcccagcacagaggcagtcacataccccggggagagccacagcaagcagccaatgttgcccaggagaggagtagctgacaaggtagaacgtgagctgccatcggctcgagaggctttgctggtcctcctggggctctggacatgaccaggaggagcgagggaagaagtcgcatggtggtcccatcctgggtggggcctgatggcagctggccacccgtcccagagtggcagccagatgccagcgccattcccacagtcacatcattggtcacagaatgcaggacatagagtgtcttctttccatcacagtgctgtccagacccatagcctagggtagacctggaagattcaatgtccacacccggggctggagcgtagccatgagccacgccccctgcccgtgcatggaaagccagcccaagctctgctccatccctagccaaagtcagtgtcctttccccttctcccaagtgagctctagccacctgcctaccctgccatctgaggatgacagccttcattccattggaacctggctctgccaccagcaggcttgcagtcctgggcagactccgtcacctctctatgcctcagcctttccatctgcacaggaggaagatgatgatggtggtgatgatgatggcgatggtttccttttgcatctgaggcaaggactaattgagatgatacacatcaggcactgggtatggtgctggtccttcctgagcactcaatctatgtgagctgtccttgtgaaatgggtgtcaccacatttccccacgcagaacatcctttgtctgccatacttgaaacatctgccccaatattaacagttccttcatggaagatgtgcacacccacccaccctcatactcccaaaggtgcccgtgctttatcaagccaaagtccagccaggaactttacagcagcatccctttccctctccaagcaccaaggagcaaggcaaagcactacatcttccatctggaggcaatgccaccctcttctcccattttcactgccatccctaagaggcagtgcttccccaaaaggttccatagcagcctgcctacagcaactctgttcacacgagtttcagcatccttgcagtggctcccctgccatgctgtggctcttcattcaccctcttctcctgctccccgtgacaggcatagattctgagtgatctggatacattgctttgtttaataacattacagcttctgtgctgaaaaagatacagcagatagagaaggcaattgttgaacacaaaatagtgacagcagagatgacggcaagttggcatttttcttttctagcaataaaacttaaagctgactcaaggagaaatggaaatcataattggaacagtaatcctcaagaaagcattaagattattaaataattgccctcacagatgacttcaggccaagatggctttatgggtgaagtttagactttcacaaaactaatcagttcccataagaactgctccaggatttggaggaacatgggaaagtctattaaagggatcacaattcacagtccccagagtaaaacatgggctaacttgcattttggcaaagagccaaatgttataaatgacatcctagaaggccaaattctgtccatctcgttgaacaaggacttacaccaggaatttagaactatttatagctcatcccaccactcaggccaatgatgacccatgatcatctcaccagaaatggaaagactcagatgattaatagagtctcaatttctctgagacatctaagagcccagcccaagcccagacccaggagggcacccaggcctggacagagaacactgatatcacaccagccctccagagggaagcagagactccttcaagctctggaaacacaggcccagacagctgcctaaagttgggcaggcttcactgcaaacccaaatcatgaagctaggtaacacctttacagattctttacatttaaaaatcatcaaaacaagagtaaataataaactcaaataatattaatctaatatgtaaaggtcttgtaccattattatgcaaacaacatacataagctaataagaaaaagaacaaatcccttaagaaatcggcaaaaaggatataacacaatttctaaaagaaaacaaatggctagcacacataaggaaaacactttgtgaacagacattcttcagaacattatttataattataaaatagttgaaagcaagatagtgcctgaagaaattatggtgcatacattagtgggactattctgcaaacattcccaattatacttgtcacatatctgtgataacgtgacagccagcattcatggggtgacctcatttggtaaaagggtgcaaagctcaacacgcattgtgagatgactgtggtgtaaaattagtgggattattccgcaaacattcccaattatacttaccgcatatctgtgataacatgacagcattcatggggtgacctcatttggtaaaagggtgcaaagctcaacacgcattgtgagatgactggtgtaaatacaaagaccaaactgtgaaaaggagtccatcaattaatcgatgcttaccttcagttttgggctaatttttaaagtatgctataagcatatgctcctgttataacagaatggagggattatgagagatgatgcaggtgtgtcctgggcctcccctggcccactgggccctagagatgccttcccaggcatcgctgtcagggcttccctcagagggagtcctgtattgacctcaccaccaaggtctggagcaggggatccttagatattggttggggttatctcaccttaggtctgaatttggggttgtcttagactgttttgtgctgttagaatagaatacccaagactgggaaatttatactgaacggaaatttatttctcacagttctagaggctgtgaagtccaagagcacaggtgccagagcaagtccaagagcaagggaaagtccaaagcaagtccaggagcatctggcgaggaccttcttgctgtgtcatcacatggcggaaggcaagaaagagagcaagagggggccgaactcacccttttataacagcaccaatcccacccatgaggtggggaccttatgacctaatcactcttcatactgttacaatggcaatgaaatttcaacatgagttttggaggagagaagcattcaaaccacagcaagggtgctcctacctcctctctcagggcatctgcagaaagagctgcaactgcacgtccttcctccgtccatcctccatcccttcccaatgtccgtgcatatcctgtgacccaggaggtctggcatagggggtgctcctgccttaggtctgaggccctgtctgaagaggggtaggtgaggaggccatctgatggtctgggccaagacagtcacaggacgcatcatttatcatcaaggaggctgagggttgagtctccaggtccagggaactccccacaaagtgggaaccctgcccagctccacacagcctctgctgggggaccctgctctggtgcagagcctggggacaggtcttgagctcagccagagtctgcctccctgtcatttaggaactaaaccaagcggcaggatgctggagcccagcccccatctgaccttacagggccaaggctggggccctgggttcccctcaaggcgcagcaggactggagccccaggcagtgcaggagtggccaaagctggggcttcctccagagcccccaagcatcacggcaccaagaagggtaggaccctggcctgaggaattggcaccaaagccccagaaactaccctggacaccatggagagaggcctggaggggaagcaccaggcactgcctccccttctgatcccacctgaggtggctgccaagcccagagagccgctctgatgtcccccagccctgcagcccagggatacctgtactgtgcccctgggggacccctggccagtctgtgcaaagaagtcaccaccctacactcagagacagtgggggtcctcgtcccacatcctcagagcatggcccggctgctgcagggatggtctcctggtcctcagagcatggcccggctgctgcagggatggtctcctggtcctcagagcatggcccagctgctgcagggatggtctcctggaggccccccagtgctctattgtcagggctccctccaccccccgcaccaagagagagccagaccccagcaaggcttccagtggcttcaggtcacacccctaggctgaccccagccccattaacacctgcctgagaaagctccacgcaccagaactgaccgtctgctccaactcttgacctcccgttctcagggcgtctgctgaaaaggctgcaactgcacatccttcctccgtccgttcccgatgtccgtgtgtctcctgtggccaggaaggtctttctcgggacctgagagccgctccctgaagtgtccccattgggaaggatggggcctgtgtctccaggctctgggaggacagaatcctgacctcaacagtggccggcacggacacaactggccccatcccggggacgctgaccagcgctgggcaacttttcccttccccgacgactgagccccgagcaccctccctgctcccctaccacctccctttacaaggctgtggcctctgcacagatgataatggagcttggctcattcccctagagtcggtagggagttaaggacaaaactcagtttcctccacctgaactcaagtctgcctatgtttacctaatcacacctggtggacagtttggacaaacttgcacactcagagacacagacacttctagaaatcattatctccctgccccggggaccccactccagcagaagtctgctaggcactggcctgggccctcctgctgtcctaggaggctgctgacctcctgcctggctcctgtccccaggtccagagtcagagcagactccagggacgctgcaggctaggaagccgccccctccaggcgagggtctagtgcaggtgcccaggacaagaaagattgtgaatgcaggaatgactgggccacacccctcccgtgcacgccccctcctgccctgcaccccacagcccagccccccgtgctggatgcccccccacagcagaggtgctgttctgtgatcccctgggaaagacgccctcaacctccaccctgtcccacggcccaaggaagacaagacacaggccctctcctcacagtctccccacctggctcctgctgggaccctcaaggtgtgaacagggaggatggttgtctgggtggcccctaggagcccagatcttcactccacagaccccaacccaagcacccccttctgcagggcccagctcatccccctcctcctccctctgctctcctctcgtcgcctctacgggaaatccgggactcagcagtaaccctcaggaagcagggcccaggcgccgtttaataggaggcttcctcacaatgaaacttttagaaagccttgactacaatgatgaccttggtgtggctgtgaacactgtcagctcccacagctgctgcagcaaaaaatgtccatagacagggtgggggcccggggtcgtctgctgtcctgctcagcccacagcacgcatggaggatctgaggtgccacacctgacgcccaggccagaacatgcctccctccagggtgacctgccatgtcctgcattgctggagggacaggggcagcctatgaggatctggggccaggagatgaatcctattaacccagaggaaaactaacaggacccaagcaccctccccgttgaagctgacctgcccagaggggcctgggcccaccccacacaccggggcggaatgtgtacaggccccggtctctgtgggtgttccgctaactggggctcccagtgctcaccccacaactaaagcgagccccagcctccagagcccccgaaggagatgccgcccacaagcccagcccccatccaggaggccccagagctcagggcgccggggcagattctgaacagccccgagtcacggtgggtacaactggaacgaccaccgtgagaaaaactgtgtccaaaactctctcctggcccctgctggaggccgcgccagagaggggagcagccgccccgaacctaggtcctgctcagctcacacgacccccagcagccagagcacagtggagtccccactgaaccccactgaatggtgaggacggggaccagggctccagggggtcatggaaggggctggaccccatcctactgctatggtcccagtgctcctggccagaactgaccctaccaccgacaagagtccctcagggaaacgggggtcactggcacctcccagcatcaaccccaggcagcacaggcataaaccccacatccagagccgactccaggagcagagacaccccagtaccctgggggacaccgaccctgatgactccccactggaatccaccccagagtccaccaggaccaaagaccccgccccggtctctgtccctcactcaggacctgctgcggggcgggccatgagaccagactcgggcttagggaacaccactgtggccccaacctcgaccaggccacaggcccttccttcctgccctgcggcagcacagactttggggtctgtgcagagaggaatcacagaggccccaggctgaggtggtgggggtggaagacccccaggaggtggcccacttcccttcctcccagctggaacccaccatgaccttcttaagataggggtgtcatccgaggcaggtcctccatggagctcccttcaggctcctccctggtcctcactaggcctcagtcccggctgtgggaatgcagccaccacaggcacaccaggcagcccagacccagccagcctgcagtgcccaagcccacattctggagcagagcaggctgtgtctgggagagtctgggctccccaccgcccccggcacaccccacccacccctgtccaggccctatgcaggagggtcagagccccccatggggtatggacttagggtctcactcacgcggctcccctcctgggtgaaggggtctcatgcccagatccccacagcagagctggtcaaaggtggaggcagtggccccagggccaccctgacctggaccctcaggctcctctagccctggctgccctgctgtccctgggaggcctggactccaccagaccacaggtccagggcaccgcccataggtgctgcccacactcagttcacaggaagaagataagctccagacccccaagactgggacctgccttcctgccaccgcttgtagctccagacctccgtgcctcccccgaccacttacacacgggccagggagctgttccacaaagatcaaccccaaaccgggaccgcctggcactcgggccgctgccacttccctctccatttgctcccagcacctctgtgctccctccctcctccctccttcaggggaacagcctgtgcagcccctccctgcaccccacaccctggggaggcccaaccctgcctccagccctttctcccccgctgctcttcctgcccatccagacaaccctggggtcccatccctgcagcctacaccctggtctccacccagacccctgtctctccctccagacacccctcccaggccaaccctgcacatgcaggccctccccttttctgctgccagagcctcagtttctaccctctgtgcctaccccctgcctcctcctgcccacaactcgagctcttcctctcctggggcccctgagccatggcactgaccgtgcactcccacccccacactgcccatgccctcaccttcctcctggacactctgaccctgctcccctcttggacccagccctggtatttccaggacaaaggctcacccaagtcttccccatgcaggcccttgccctcactgcccggttacacggcagcctcctgtgcacagaagcagggagctcagcccttccacaggcagaaggcactgaaagaaatcggcctccagcaccctgatgcacgtccgcctgtgtctctcactgcccgcacctgcagggaggctcggcactccctgtaaagacgagggatccaggcagcaacatcatgggagaatgcagggctcccagacagcccagccctctcgcaggcctctcctgggaagagacctgcagccaccactgaacagccacggagcccgctggatagtaactgagtcagtgaccgacctggagggcaggggagcagtgaaccggagcccagaccatagggacagagaccagccgctgacatcccgagcccctcactggcggccccagaacaccgcgtggaaacagaacagacccacattcccacctggaacagggcagacactgctgagcccccagcaccagccctgagaaacaccaggcaacggcatcagagggggctcctgagaaagaaaggaggggaggtctccttcaccagcaagtacttcccttgaccaaaaacagggtccacgcaactcccccaggacaaaggaggagccccctgtacagcactgggctcagagtcctctccaacacaccctgagtttcagacaaaaaccccctggaaatcatagtatcagcaggagaactagccagagacagcaagaggggactcagtgactcccgcggggacaggaggattttgtgggggctcgtgtcactgtgaggatattgtagtagtaccagctgctatgcccacagtgacacagccccattcccaaagccctgctgtaaacgcttccacttctggagctgaggggctggggggagcgtctgggaagtagggcctaggggtggccatcaatgcccaaaacgcaccagactcccccccagacatcaccccactggccagtgagcagagtaaacagaaaatgagaagcagctgggaagcttgcacaggccccaaggaaagagctttggcgggtgtgcaagaggggatgcgggcagagcctgagcagggccttttgctgtttctgctttcctgtgcagatagttccataaactggtgttcaagatcgatggctgggagtgagcccaggaggacagtgtgggaagggcacagggaaggagaagcagccgctatcctacactgtcatctttcaagagtttgccctgtgcccacaatgctgcatcatgggatgcttaacagctgatgtagacacagctaaagagagaatcagtgaaatggatttgcagcacagatctgaataaattctccagaatgtggagccacacagaagcaagcacaaggaaagtgcctgatgcaagggcaaagtacagtgtgtaccttcaggctgggcacagacactctgaaaagccttggcaggaactccctgcaacaaagcagagccctgcaggcaatgccagctccagagccctccctgagagcctcatgggcaaagatgtgcagaacatatgtttgtcatagccccaaactgagaatgaagcaaacagccatctgaaggaaaacaggcaaataaacgatggcaggttcatgaaatgcaaacccagacagccagaaggacaacagtgagggttacaggtgactctgtggttgagttcatgacaatgctgagtaattggagtaacaaaggaaagtccaaaaaatactttcaatgtgatttcttctaaataaaatttacagccggcaaaatgaactatcttcttaagggataaactttccactaggaaaactataaggaaaatcaagaaaaggatgatcacataaacacagtggtcgttacttctactggggaaggaagagggtatgaactgagacacacagggttggcaagtctcctaacaagaagagaacaaatacattacagtaccttgaaaacagcagttaaaattctaaattgcaagaagaggaaaatgcacacagctgtgtttagaaaattctcagtccagcactgttcataatagcaaagacattaacccaggttggataaataaacgatgacacaggcaattgcacaatgatacagacatacattcagtatatgagacattgatgatgtatccccaaagaaatgactttaaagagaaaaggcctgatatgtggtggcactcacctccctgggcatccccggacaggctgcaggcacactgtgtggcagggcaggctggtacctgctggcagctcctggggcctgatgtggagcaggcacagagccgtatccccccgaggacatatacccccaaggacggcacagttggtacattccggagacaagcaactcagccacactcccaggccagagcccgagagggacgcccatgcacagggaggcagagcccagctcctccacagccagcagcacctgtgcaggggccgccatctggcaggcacagagcatgggctgggaggaggggcagggacaccaggcagggttggcaccaactgaaaattacagaagtctcatacatctacctcagccttgcctgacctgggcctcacctgacctggacctcacctggcctggacctcacctggcctagacctcacctctgggcttcacctgagctcggcctcacctgacttggaccttgcctgtcctgagctcacatgatctgggcctcacctgacctgggtttcacctgacctgggcttcacctgacctgggcctcatctgacctgggcctcactggcctggacctcacctggcctgggcttcacctggcctcaggcctcatctgcacctgctccaggtcttgctggaacctcagtagcactgaggctgcaggggctcatccagggttgcagaatgactctagaacctcccacatctcagctttctgggtggaggcacctggtggcccagggaatataaaaagcctgaatgatgcctgcgtgatttgggggcaatttataaacccaaaaggacatggccatgcagcgggtagggacaatacagacagatatcagcctgaaatggagcctcagggcacaggtgggcacggacactgtccacctaagccaggggcagacccgagtgtccccgcagtagacctgagagcgctgggcccacagcctcccctcggtgccctgctacctcctcaggtcagccctggacatcccgggtttccccaggcctggcggtaggtttggggtgaggtctgtgtcactgtggtattacgatttttggagtggttattatacccacagtgtcacagagtccatcaaaaacccatccctgggaacctgctgccacagccctccctgtggggcaccgccgcgtgccatgttaggattttgactgaggacacagcaccatgggtatggtggctaccgcagcagtgcagcctgtgacccaaacacacagggcagcaggcacaacagacaagcccacaagtgaccaccctgagctcctgcctgccagccctggagaccatgaaacagatggccaggattatcccataggtcagccagacctcagtccaacaggtctgcatcgctgctgccctccaataccagtccggatggggacagggccggcccacattaccatttgctgccatccggccaacagtcccagaagcccctccctcaaggctgggccacatgtgtggaccctgagagccccccatgtctgagtaggggcaccaggaaggtggggctggccctgtgcactgtcactgcccctgtggtccctggcctgcctggccctgacacctgggcctctcctgggtcatttccaagacagaagacattcccaggacagctggagctgggagtccatcatcctgcctggccatcctgagtcctgcgcctttccaaacctcacccgggaagccaacagaggaatcacctcccacaggcagagacaaagaccttccagaaatctctgtctctctccccagtgggcaccctcttccagggcagtcctcagtgatatcacagtgggaacccacatctggatcgggactgcccccagaacacaagatggcccacagggacagccccacagcccagcccttcccagacccctaaaaggcgtcccaccccctgcatctgccccagggctcaaactccaggaggactgactcctgcacaccctcctgccagacatcacctcagcccctcctggaagggacaggagcgcgcaagggtgagtcagaccctcctgccctcgatggcaggcggagaagattcagaaaggtctgagatccccaggacgcagcaccactgtcaatgggggccccagacgcctggaccagggcctgcgtgggaaaggcctctgggcacactcaggggctttttgtgaagggtcctcctactgtgtgactacagtaactaccacagtgatgaacccagcagcaaaaactgaccggactcccaaggtttatgcacacttctccgctcagagctctccaggatcagaagagccgggcccaagggtttctgcccagaccctcggcctctagggacatcttggccatgacagcccatgggctggtgccccacacatcgtctgccttcaaacaagggcttcagagggctctgaggtgacctcactgatgaccacaggtgccctggccccttccccgccagctgcaccagaccccgtcctgacagatgccccgattccaacagccaattcctggggccaggaatcgctgtagacaccagcctccttccaacacctcttgccaattgcctggattcccatcccggttggaatcaagaggacagcatcccccaggctcccaacaggcaggactcccacaccctcctctgagaggccgctgtgttccgtagggccaggctgcagacagtccccctcacctgccactagacaaatgcctgctgtagatgtccccacctggaaaagaccactcatggagcccccagccccaggtacagccatagagagagtctctgaggcccctaagaagtagccatgcccagttctgccgggaccctcggccaggctgacaggagtggacgctggagctgggcccacactgggccacataggagctcaccagtgagggcaggagagcacatgccggggagcacccagcctcctgctgaccagaggcccgtcccagagcccaggaggctgcagaggcctctccagggggacactgtgcatgtctggtccctgagcagccccccatgtccccagtcctgggggcccctggcacagctgtctggaccctctctattccctgggaagctcctcctgacagccccgcctccagttccaggtgtggttattgtcagggggtgtcagactgtggtggatacagctatggttaccacagtggtgctgcccatagcagcaaccaggccaagtagacaggcccctgctgtgcagccccaggcctccagctcacctgcttctcctggggctctcaaggctgctgttttctgcactctcccctctgtggggagggttccctcagtgggagatctgttctcaacatcccagggcctcattcctgcaaggaaggccaatggatgggcaacctcacatgccgcggctaagatagggtgggcagcctggcggggacaggacatcctgctggggtatctgtcactgtgcctagtggggcactggctcccaaacaacgcagtcctcgccaaaatccccacggcctcccccgctaggggctggcctgatctcctgcagtcctaggaggctgctgacctccagaatggctccgtccccagttccagggcgagagcagatcccaggccggctgcagactgggaggccaccccctccttcccagggttcactgcaggtgaccagggcaggaaatggcctgaacacagggataaccgggccatcccccaacagagtccaccccctcctgctctgtaccccgcacccccaaggccagcccatgacatccgacaaccccacaccagagtcactgcccggtgctgccctagggaggacccctcagcccccaccctgtctagaggactggggaggacaggacacgccctctccttatggttcccccacctggctctggctgggacccttggggtgtggacagaaaggacgcttgcctgattggcccccaggagcccagaacttctctccagggaccccagcccgagcacccccttacccaggacccagccctgcccctcctcccatctgctctcctctcatcaccccatgggaatccagaatccccaggaagccatcaggaagggctgagggaggaagtggggccactgcaccaccaggcaggaggctccgtctttgtgaacccagggaggtgccagcctcctagagggtatggtccaccctgcctatggctcccacagtggcaggctgcagggaaggaccagggacggtgtgggggagggctcagggccccgcgggtgctccatcttggatgagcccatctctctcacccacggactcacccacctcctctccaccctggccacacgtcgtccacaccatcctaagtcccacctacaccagagccggcacagccagtgcagacagaggctggggtgcaggggggccgccagggcagctttggggagggaaggatggaggaaggggagttcagtgaagaggcccccctcccctgggtccaggatcctcctctgggacccccggatcccatcccctccaggctctgggaggagaagcaggatgggagaatctgtgcgggaccctctcacagtggaatacctccacagcggctcaggcaagacccaaaagcccctcagtgagccctccactgcagtcctgggcctgggtagcagcccctcccacagaggatgaacccagcaccccgaggatgtcctgccagggggagctcagagccatgaaggagcaggatatgggacccccgatacaggcacagacctcagctccattcaggactgccacgtcctgccctgggaggaacccctttctctagtccctgcaggccaggaggcagctgactcctgacttggacgcctattccagacaccagacagaggggcaggccccccagaaccagggatgaggacgccccgtcaaggccagaaaagaccaagttgtgctgagcccagcaagggaaggtccccaaacaaaccaggaagtttctgaaggtgtctgtgtcacagtggagtatagcagctcgtcccacagtgacactcgccaggccagaaaccccatcccaagtcagcggaatgcagagagagcagggaggacatgtttaggatctgaggccgcacctgacacccaggccagcagacgtctcctgtccatggcaccctgccatgtcctgcatttctggaagaacaagggcaggctgaagggggtccaggaccaggagatgggtcccctctacccagagaaggagccaggcaggacacaagccccctccccattgaggctgacctgcccagagggtcctgggcccaccccacacaccggggcggaatgtgtgcaggcctcggtctctgtgggtgttccgctagctggggctcacagtgctcaccccacacctaaaacgagccacagcctcagagcccctgaaggagaccccgcccacaagcccagcccccacccaggaggccccagagcacagggcgccccgtcggattctgaacagccccgagtcacagtgggtataactggaactaccactgtgagaaaagcttcgtccaaaacggtctcctggccacagtcggaggccccgccagagaggggagcagccaccccaaacccatgttctgccggctcccatgaccccgtgcacctggagccccacagtgtccccactggatgggaggacaagggccgggggctccggcgggtcggggcaggggcttgatggcttccttctgccgtggctccagtgcccctggctggagttgacccttctgacaagtgtcctcagagagtcagggatcagtggcacctccctaacatcaaccccacgcagcgcaggcacaaaccccacatccagggccaactccaggaacagagacaccccaataccctgggggaccccaaccctgatgactcccgtcccatctctgtccctcacttggggcctgctgcggggcgagcacctgggagcaaactcaggattaggggacaccactgtgggcctgacctcgagcaggccacagacccttccctcctgccctggtgcagcacagactttggggtctgggcagggaggaacttctggcaggtcaccaagcacagagcccccaggctgaggtggccccagggggaaccccagcaggtggcccactacccttcctcccagctggaccccatgtcttccccaagataggggtgccatccaaggcaggtcctccatggagcccccttcaggctcctctccagaccccactgggcctcagtccccactctaggaatgcagccaccacgggcacaccaggcagcccaggcccagccaccctgcagtgcccaagcccacaccctggaggagagcagggtgcgtctgggaggggctgggctccccacccccacccccacctgcacaccccacccacccttgcccgggccccctgcaggagggtcagagcccccatgggatatggacttagggtctcactcacgcacctcccctcctgggagaaggggtctcatgcccagatccccccagcagcgctggtcacaggtagaggcagtggccccagggccaccctgacctggcccctcaggctcctctagccctggctgccctgctgtccctgggaggcctgggctccaccagaccacaggtctagggcaccgcccacactggggccgcccacacacagctcacaggaagaagataagctccagacccccaggcccgggacctgccttgctgctacgacttcctgccccagacctcgttgccctcccccgtccacttacacacaggccaggaagctgttcccacacagaccaaccccagacggggaccacctggcactcaggtcactgccatttccttctccattcacttccaatgcctctgtgcttcctccctcctccttccttcgggggagcaccctgtgcagctcctccctgcagtccacaccctggggagacccgaccctgcagcccacaccctggggagacctgaccctcctccagccctttctcccccgctgctcttgccacccaccaagacagccctggggtcctgtccctacagcccccacccagttctctacctagacccgtcttcctccctctaaacacctctcccaggccaaccctacacctgcaggccctcccctccactgccaaagaccctcagtttctcctgcctgtgcccacccccgtgctcctcctgcccacagctcgagctcttcctctcctagggcccctgagggatggcattgaccgtgccctcgcacccacacactgcccatgccctcacattcctcctggccactccagccccactcccctctcaggcctggctctggtatttctgggacaaagccttacccaagtctttcccatgcaggcctgggcccttaccctcactgcccggttacagggcagcctcctgtgcacagaagcagggagctcagcccttccacaggcagaaggcactgaaagaaatcggcctccagcgccttgacacacgtctgcctgtgtctctcactgcccgcacctgcagggaggctcggcactccctctaaagacgagggatccaggcagcagcatcacaggagaatgcagggctaccagacatcccagtcctctcacaggcctctcctgggaagagacctgaagacgcccagtcaacggagtctaacaccaaacctccctggaggccgatgggtagtaacggagtcattgccagacctggaggcaggggagcagtgagcccgagcccacaccatagggccagaggacagccactgacatcccaagccactcactggtggtcccacaacaccccatggaaagaggacagacccacagtcccacctggaccagggcagagactgctgagacccagcaccagaaccaaccaagaaacaccaggcaacagcatcagagggggctctggcagaacagaggaggggaggtctccttcaccagcaggcgcttcccttgaccgaagacaggatccatgcaactcccccaggacaaaggaggagccccttgttcagcactgggctcagagtcctctccaagacacccagagtttcagacaaaaaccccctggaatgcacagtctcagcaggagagccagccagagccagcaagatggggctcagtgacacccgcagggacaggaggattttgtgggggctcgtgtcactgtgaggatattgtactaatggtgtatgctatacccacagtgacacagccccattcccaaagccctactgcaaacgcattccacttctggggctgaggggctgggggagcgtctgggaaatagggctcaggggtgtccatcaatgcccaaaacgcaccagactcccctccatacatcacacccaccagccagcgagcagagtaaacagaaaatgagaagcaagctggggaagcttgcacaggccccaaggaaagagctttggcgggtgtgtaagaggggatgcgggcagagcctgagcagggccttttgctgtttctgctttcctgtgcagagagttccataaactggtgttcgagatcaatggctgggagtgagcccaggaggacagcgtgggaagagcacagggaaggaggagcagccgctatcctacactgtcatctttcgaaagtttgccttgtgcccacactgctgcatcatgggatgcttaacagctgatgtagacacagctaaagagagaatcagtgagatggatttgcagcacagatctgaataaattctccagaatgtggagcagcacagaagcaagcacacagaaagtgcctgatgcaaggacaaagttcagtgggcaccttcaggcattgctgctgggcacagacactctgaaaagccctggcaggaactccctgtgacaaagcagaaccctcaggcaatgccagccccagagccctccctgagagcctcatgggcaaagatgtgcacaacaggtgtttctcatagccccaaactgagagcaaagcaaacgtccatctgaaggagaacaggcaaataaacgatggcaggttcatgaaatgcaaacccagacagccacaagcacaaaagtacagggttataagcgactctggttgagttcatgacaatgctgagtaattggagtaacaaagtaaactccaaaaaatactttcaatgtgatttcttctaaataaaatttacaccctgcaaaatgaactgtcttcttaagggatacatttcccagttagaaaaccataaagaaaaccaagaaaaggatgatcacataaacacagtggtggttacttctgctggggaaggaagagggtatgaactgagatacacagggtgggcaagtctcctaacaagaacagaacgaatacattacagtaccttgaaaacagcagttaaacttctaaattgcaagaagaggaaaatggacacagttgtgtttagaaaattctcagtccagcactgttcataatagcaaagacattaacccaggtcggataaataagcgatgacacaggcaattgcacaatgatacagacatatatttagtatatgagacatcgatgatgtatccccaaataaacgactttaaagagataaagggctgatgtgtggtggcattcacctccctgggatccccggacaggttgcaggctcactgtgcagcagggcaggcgggtacctgctggcagttcctggggcctgatgtggagcaagcgcagggccatatatcccggaggacggcacagtcagtgaattccagagagaagcaactcagccacactccccaggcagagcccgagagggacgcccacgcacagggaggcagagcccagcacctccgcagccagcaccacctgtgcacgggccaccaccttgcaggcacagagtgggtgctgagaggaggggcagggacaccaggcagggtgagcacccagagaaaactgcagacgcctcacacatccacctcagcctcccctgacctggacctcactggcctgggcctcacttaacctgggcttcacctgaccttggcctcacctgacttggacctcgcctgtcccaagctttacctgacctgggcctcaactcacctgaacgtctcctgacctgggtttaacctgtcctggaactcacctggccttggcttcccctgacctggacctcatctggcctgggcttcacctggcctgggcctcacctgacctggacctcatctggcctggacctcacctggcctggacttcacctggcctgggcttcacctgacctggacctcacctggcctcgggcctcacctgcacctgctccaggtcttgctggagcctgagtagcactgagggtgcagaagctcatccagggttggggaatgactctagaagtctcccacatctgacctttctgggtggaggcagctggtggccctgggaatataaaaatctccagaatgatgactctgtgatttgtgggcaacttatgaacccgaaaggacatggccatggggtgggtagggacatagggacagatgccagcctgaggtggagcctcaggacacaggtgggcacggacactatccacataagcgagggatagacccgagtgtccccacagcagacctgagagcgctgggcccacagcctcccctcagagccctgctgcctcctccggtcagccctggacatcccaggtttccccaggcctgccggtaggtttagaatgaggtctgtgtcactgtggtattacgatattttgactggttattataaccacagtgtcacagagtccatcaaaaacccatgcctggaagcttcccgccacagccctccccatggggccctgctgcctcctcaggtcagccccggacatcccgggtttccccaggctgggcggtaggtttggggtgaggtctgtgtcactgtggtattactatggttcggggagttattataaccacagtgtcacagagtccatcaaaaacccatccctgggagcctcccgccacagccctccctgcaggggaccggtacgtgccatgttaggattttgatcgaggagacagcaccatgggtatggtggctaccacagcagtgcagcctgtgacccaaacccgcagggcagcaggcacgatggacaggcccgtgactgaccacgctgggctccagcctgccagccctggagatcatgaaacagatggccaaggtcaccctacaggtcatccagatctggctccgaggggtctgcatcgctgctgccctcccaacgccagtccaaatgggacagggacggcctcacagcaccatctgctgccatcaggccagcgatcccagaagcccctccctcaaggctgggccacatgtgtggacactgagagccctcatgtctgagtaggggcaccaggagggaggggctggccctgtgcactgtccctgcccctgtggtccctggcctgcctggccctgacacctgagcctctcctgggtcatttccaagacagaagacattcctggggacagccggagctgggcgtcgctcatcctgcccggccgtcctgagtcctgctcatttccagacctcaccggggaagccaacagaggactcgcctcccacattcagagacaaagaaccttccagaaatccctgcctctctccccagtggacaccctcttccaggacagtcctcagtggcatcacagcggcctgagatccccaggacgcagcaccgctgtcaataggggccccaaatgcctggaccagggcctgcgtgggaaaggtctctggccacactcgggctttttgtgaagggccctcctgctgtgtgactacagtaactaccatagtgatgaacccagtggcaaaaactggctggaaacccaggggctgtgtgcacgcctcagcttggagctctccaggagcacaagagccgggcccaaggatttgtgcccagaccctcagcctctagggacacctgggccatctcagcctgggctggtgccctgcacaccatcttcctccaaataggggcttcagagggctctgaggtgacctcactcatgaccacaggtgacctggcccttccctgccagctataccagaccctgtcttgacagatgccccgattccaacagccaattcctgggaccctgaatagctgtagacaccagcctcattccagtacctcctgccaattgcctggattcccatcctggctggaatcaagaaggcagcatccgccaggctcccaacaggcaggactcccgcacaccctcctctgagaggccgctgtgttccgcagggccaggccctggacagttcccctcacctgccactagagaaacacctgccattgtcgtccccacctggaaaagaccactcgtggagcccccagccccaggtacagctgtagagagagtcctcgaggcccctaagaaggagccatgcccagttctgccgggaccctcggccaggccgacaggagtggacgctggagctgggcccacactgggccacataggagctcaccagtgagggcaggagagcacatgccggggagcacccagcctcctgctgaccagaggcctgccccagagcccaggaggctgcagaggcctctccagggagacactgtgcatgtctggtacctaagcagccccccacgtccccagtcctgggggcccctggctcagctgtctggaccctccctgttccctgggaagctcctcctgacagccccgcctccagttccaggtgtggttattgtcaggcgatgtcagactgtggtggatatagtggctacgattaccacagtggtgccgcccatagcagcaaccaggccaagtagacaggcccctgctgcgcagccccaggcatccacttcacctgcttctcctggggctctcaaggctgctgtctgtcctctggccctctgtggggagggttccctcagtgggaggtctgtgctccagggcagggatgattgagatagaaatcaaaggctggcagggaaaggcagcttcccgccctgagaggtgcaggcagcaccacggagccacggagtcacagagccacggagcccccattgtgggcatttgagagtgctgtgcccccggcaggcccagccctgatggggaagcctgtcccatcccacagcccgggtcccacgggcagcgggcacagaagctgccaggttgtcctctatgatcctcatccctccagcagcatcccctccacagtggggaaactgaggcttggagcaccacccggccccctggaaatgaggctgtgagcccagacagtgggcccagagcactgtgagtaccccggcagtacctggctgcagggatcagccagagatgccaaaccctgagtgaccagcctacaggaggatccggccccacccaggccactcgattaatgctcaaccccctgccctggagacctcttccagtaccaccagcagctcagcttctcagggcctcatccctgcaaggaaggtcaagggctgggcctgccagaaacacagcaccctccctagccctggctaagacagggtgggcagacggctgtggacgggacatattgctggggcatttctcactgtcacttctgggtggtagctctgacaaaaacgcagaccctgccaaaatccccactgcctcccgctaggggctggcctggaatcctgctgtcctaggaggctgctgacctccaggatggctccgtccccagttccagggcgagagcagatcccaggcaggctgtaggctgggaggccacccctgcccttgccggggttgaatgcaggtgcccaaggcaggaaatggcatgagcacagggatgaccgggacatgccccaccagagtgcgccccttcctgctctgcaccctgcaccccccaggccagcccacgacgtccaacaactgggcctgggtggcagccccacccagacaggacagacccagcaccctgaggaggtcctgccagggggagctaagagccatgaaggagcaagatatggggcccccgatacaggcacagatgtcagctccatccaggaccacccagcccacaccctgagaggaacgtctgtctccagcctctgcaggtcgggaggcagctgacccctgacttggacccctattccagacaccagacagaggcgcaggccccccagaaccagggttgagggacgccccgtcaaagccagacaaaaccaaggggtgttgagcccagcaagggaaggcccccaaacagaccaggaggtttctgaaggtgtctgtgtcacagtggggtatagcagcagctggtaccacagtgacactcacccagccagaaaccccattccaagtcagcggaagcagagagagcagggaggacacgtttaggatctgagactgcacctgacacccaggccagcagacgtctcccctccagggcaccccaccctgtcctgcatttctgcaagatcaggggcggcctgagggggggtctagggtgaggagatgggtcccctgtacaccaaggaggagttaggcaggtcccgagcactctccccattgaggctgacctgcccagagagtcctgggcccaccccacacaccggggcggaatgtgtgcaggcctcggtctctgtgggtgttccgctagctggggctcacagtgctcaccccacacctaaaatgagccacagcctccggagcccccgcaggagaccccgcccacaagcccagcccccacccaggaggccccagagctcagggcgccccgtcggattccgaacagccccgagtcacagcgggtataaccggaaccaccactgtcagaatagctacgtcaaaaactgtccagtggccactgccggaggccccgccagagagggcagcagccactctgatcccatgtcctgccggctcccatgacccccagcacgcggagccccacagtgtccccactggatgggaggacaagagctggggattccggcgggtcggggcaggggcttgatcgcatccttctgccgtggctccagtgcccctggctggagttgacccttctgacaagtgtcctcagagagacaggcatcaccggcgcctcccaacatcaaccccaggcagcacaggcacaaaccccacatccagagccaactccaggagcagagacaccccaataccctgggggaccccgaccctgatgacttcccactggaattcgccgtagagtccaccaggaccaaagaccctgcctctgcctctgtccctcactcaggacctgctgccgggcgaggccttgggagcagacttgggcttaggggacaccagtgtgaccccgaccttgaccaggacgcagacctttccttcctttcctggggcagcacagactttggggtctgggccaggaggaacttctggcaggtcgccaagcacagaggccacaggctgaggtggccctggaaagacctccaggaggtggccactccccttcctcccagctggaccccatgtcctccccaagataagggtgccatccaaggcaggtgctccttggagccccattcagactcctccctggaccccactgggcctcagtcccagctctggggatgaagccaccacaagcacaccaggcagcccaggcccagccaccctgcagtgcccaagcacacactctggagcagagcagggtgcctctgggaggggctgagctccccaccccacccccacctgcacaccccacccacccctgcccagcggctctgcaggagggtcagagccccacatggggtatggacttagggtctcactcacgtggctcccatcatgagtgaaggggcctcaagcccaggttcccacagcagcgcctgtcgcaagtggaggcagaggcccgagggccaccctgacctggtccctgaggttcctgcagcccaggctgccctgctgtccctgggaggcctgggctccaccagaccacaggtccagggcaccgggtgcaggagccacccacacacagctcacaggaagaagataagctccagacccccagggccagaacctgccttcctgctactgcttcctgccccagacctgggcgccctcccccgtccacttacacacaggccaggaagctgttcccacacagaacaaccccaaaccaggaccgcctggcactcaggtggctgccatttccttctccatttgctcccagcgcctctgtcctccctggttcctccttcgggggaacagcctgtgcagccagtccctgcagcccacaccctggggagacccaaccctgcctggggcccttccaaccctgctgctcttactgcccacccagaaaactctggggtcctgtccctgcagtccctaccctggtctccacccagacccctgtgtatcactccagacacccctcccaggccaaccctgcacctgcaggccctgtcctcttctgtcgctagagcctcagtttctcccccctgtgcccacaccctacctcctcctgcccacaactctaactcttcttctcctggagcccctgagccatggcattgaccctgccctcccaccacccacagcccatgccctcaccttcctcctggccactccgaccccgccccctctcaggccaagccctggtatttccaggacaaaggctcacccaagtctttcccaggcaggcctgggctcttgccctcacttcccggttacacgggagcctcctgtgcacagaagcagggagctcagcccttccacaggcagaaggcactgaaagaaatcggcctccagcaccttgacacacgtccgcccgtgtctctcactgcccgcacctgcagggaggctccgcactccctctaaagacaagggatccaggcagcagcatcacgggagaatgcagggctcccagacatcccagtcctctcacaggcctctcctgggaagagacctgcagccaccaccaaacagccacagaggctgctggatagtaactgagtcaatgaccgacctggagggcaggggagcagtgagccggagcccataccatagggacagagaccagccgctgacatcccgagctcctcaatggtggccccataacacacctaggaaacataacacacccacagccccacctggaacagggcagagactgctgagcccccagcaccagccccaagaaacaccaggcaacagtatcagagggggctcccgagaaagagaggaggggagatctccttcaccatcaaatgcttcccttgaccaaaaacagggtccacgcaactcccccaggacaaaggaggagccccctatacagcactgggctcagagtcctctctgagacaccctgagtttcagacaacaacccgctggaatgcacagtctcagcaggagaacagaccaaagccagcaaaagggacctcggtgacaccagtagggacaggaggattttgtgggggctcgtgtcactgtgaggatattgtagtggtggtagctgctactcccacagtgacacagacccattcccaaagccctactgcaaacacacccactcctggggctgaggggctgggggagcgtctgggaagtagggtccaggggtgtctatcaatgtccaaaatgcaccagactccccgccaaacaccaccccaccagccagcgagcagggtaaacagaaaatgagaggctctgggaagcttgcacaggccccaaggaaagagctttggcaggtgtgcaagaggggatgcaggcagagcctgagcagggccttttgctgtttctgctttcctgtgcagagagttccataaactggtgttcaagatcagtggctgggaatgagcccaggagggcagtctgtgggaagagcacagggaaggaggagcagccgctatcctacactgtcatctttcaaaagtttgccttgtgaccacactattgcatcatgggatgcttaagagctgatgtagacacagctaaagagagaatcagtgagatgaatttgcagcatagatctgaataaactctccagaatgtggagcagtacagaagcaaacacacagaaagtgcctgatgcaaggacaaagttcagtgggcaccttcaggcattgctgctgggcacagacactctgaaaagccctggcaggatctccctgcgacaaagcagaaccctcaggcaatgccagccccagagccctccctgagagcgtcatggggaaagatgtgcagaacagctgattatcatagactcaaactgagaacagagcaaacgtccatctgaagaacagtcaaataagcaatggtaggttcatgcaatgcaaacccagacagccaggggacaacagtagagggctacaggcggctttgcggttgagttcatgacaatgctgagtaattggagtaacagaggaaagcccaaaaaatacttttaatgtgatttcttctaaataaaatttacaccaggcaaaatgaactgtcttcttaagggataaactttcccctggaaaaactacaaggaaaattaagaaaacgatgatcacataaacacagttgtggttacttctactggggaaggaagagggtatgagctgagacacacagagtcggcaagtctccaagcaagcacagaacgaatacattacagtaccttgaatacagcagttaaacttctaaatcgcaagaagaggaaaatgcacacagctgtgtttagaaaattctcagtccagcactattcataatagcaaagacattaacccaggttggataaataaatgatgacacaggcaattgcacaatgatacagacatacatttagtacatgagacatcgatgatgtatccccaaagaaatgactttaaagagaaaaggcctgatgtgtggtggcactcacctccctgggatccccggacaggttgcaggcacactgtgtggcagggcaggctggtacatgctggcagctcctggggcctgatgtggagcaagcgcagggctgtatacccccaaggatggcacagtcagtgaattccagagagaagcagctcagccacactgcccaggcagagcccgagagggacgcccacgcacagggaggcagagcccagctcctccacagccaccaccacctgtgcacgggccaccaccttgcaggcacagagtgggtgctgagaggaggggcagggacaccaggcagggtgagcacccagagaaaactgcagaagcctcacacatccacctcagcctcccctgacctggacctcacctggtctggacctcacctggcctgggcctcacctgacctggacctcacctggcctgggcttcacctgacctggacctcacctggcctccggcctcacctgcacctgctccaggtcttgctggaacctgagtagcactgaggctgcagaagctcatccagggttggggaatgactctggaactctcccacatctgacctttctgggtggaggcatctggtggccctgggaatataaaaagccccagaatggtgcctgcgtgatttgggggcaatttatgaacccgaaaggacatggccatggggtgggtagggacatagggacagatgccagcctgaggtggagcctcaggacacagttggacgcggacactatccacataagcgagggacagacccgagtgttcctgcagtagacctgagagcgctgggcccacagcctcccctcggtgccctgctgcctcctcaggtcagccctggacatcccgggtttccccaggcctggcggtaggtttgaagtgaggtctgtgtcactgtggtattatgattacgtttgggggagttatcgttatacccacagcatcacacggtccatcagaaacccatgccacagccctccccgcaggggaccgccgcgtgccatgttacaattttgatcgaggacacagcgccatgggtatggtggctaccacagcagtgcagcccatgacccaaacacacagggcagcaggcacaatggacaggcctgtgagtgaccatgctgggctccagcccgccagccccggagaccatgaaacagatggccaaggtcaccccacagttcagccagacatggctccgtggggtctgcatcgctgctgccctctaacaccagcccagatggggacaaggccaaccccacattaccatctcctgctgtccacccagtggtcccagaagcccctccctcatggctgagccacatgtgtgaaccctgagagcaccccatgtcagagtaggggcagcagaagggcggggctggccctgtgcactgtccctgcacccatggtccctcgcctgcctggccctgacacctgagcctcttctgagtcatttctaagatagaagacattcccggggacagccggagctgggcgtcgctcatcctgcccggccgtcctgagtcctgcttgtttccagacctcaccagggaagccaacagaggactcacctcacacagtcagagacaaagaaccttccagaaatccctgtctcactccccagtgggcaccttcttccaggacattcctcggtcgcatcacagcaggcacccacatctggatcaggacggcccccagaacacaagatggcccatggggacagccccacaacccaggccttcccagacccctaaaaggcgtcccaccccctgcacctgccccagggctaaaaatccaggaggcttgactcccgcataccctccagccagacatcacctcagccccctcctggaggggacaggagcccgggagggtgagtcagacccacctgccctcgatggcaggcggggaagattcagaaaggcctgagatccccaggacgcagcaccactgtcaatgggggccccagacgcctggaccagggcctgcgtgggaaaggccgctgggcacactcaggggctttttgtgaaggcccctcctactgtgtgactacggtgactaccacagtgatgaaactagcagcaaaaactggccggacacccagggaccatgcacacttctcagcttggagctctccaggaccagaagagtcaggtctgagggtttgtagccagaccctcggcctctagggacaccctggccatcacagcggatgggctggtgccccacatgccatctgctccaaacaggggcttcagagggctctgaggtgacttcactcatgaccacaggtgccctggccccttccccgccagctacaccgaaccctgtcccaacagctgccccagttccaacagccaattcctggggcccagaattgctgtagacaccagcctcgttccagcacctcctgccaattgcctggattcacatcctggctggaatcaagagggcagcatccgccaggctcccaacaggcaggactcccgcacaccctcctctgagaggccgctgtgttccgcagggccaggccctggacagttcccctcacctgccactagagaaacacctgccattgtcgtccccacctggaaaagaccactcgtggagcccccagccccaggtacagctgtagagagactccccgagggatctaagaaggagccatgcgcagttctgccgggaccctcggccaggccgacaggagtggacactggagctgggcccacactgggccacataggagctcaccagtgagggcaggagagcacatgccggggagcacccagcctcctgctgaccagaggcctgccccagagcccaggaggctgcagaggcctctccagggggacactgtgcatgtctggtccctgagcagccccccatgtccccagtcctgggggcccctggcacagctgtctggaccctccctgttccctgggaagctcctcctgacagccccgcctccagttccaggtgtggttattgtcagggggtgtcagactgtggtggatacagctatggttaccacagtggtgctgcccatagcagcaaccaggccaagtagacaggcccctgctgtgcagccccaggcctccagctcacctgcttctcctggggctctcaaggtcactgttgtctgtactctgccctctgtggggagggttctctcagtgggaggtctgttctcaacatcccagggcctcatgtctgcacggaaggccaatggatgggcaacctcacatgccgcggctaagatagggtgggcagcctggcgggggacagtacatactgctggggtgtctgtcactgtgcctagtggggcactggctcccaaacaacgcagtcctcaccaaaatccccacagcctcccctgctaggggctggcctgatctcctgcagtcctaggaggctgctgacctccagaatgtctccgtccccagttccagggcgagagcagatcccaggccggctgcagactgggaggccaccccctccttcccagggttcactggaggtgaccaaggtaggaaatggccttaacacagggatgactgcgccatcccccaacagagtcagccccctcctgctctgtaccccgcaccccccaggccagtccacgaaaaccagggccccacatcagagtcactgcctggcccggccctggggcggacccctcagcccccaccctgtctagaggacttggggggacaggacacaggccctctccttatggttcccccacctgcctccggccgggacccttggggtgtggacagaaaggacacctgcctaattggcccccaggaacacagaacttctctccagggaccccagcccgagcacccccttacccaggacccagccctgcccctcctcccctctgctctcctctcatcaccccatgggaatccggtatccccaggaagccatcaggaagggctgaaggaggaagcggggccgtgcaccaccgggcagcaggctccgtcttcgtgaacccagggaagtgccagcctcctagagggtatggtccaccctgcctggggctcccaccgtggcaggctgcggggaaggaccagggacggtgtgggggagggctcagggccctgcgggtgctcctccatcttcggtgagcctcccccttcacccaccgtcccgcccacctcctctccaccctggctgcacgtcttccacaccatcctgagtcctacctacaccagagccagcaaagccagtgcagacaaaggctggggtgcaggggggctgccagggcagcttcggggagggaaggatggagggaggggaggtcagtgaagaggcccccttcccctgggtccaggatcctcctctgggacccccggctcccatcccctcctggctctgggaggagaagcaggatgggagaatctgtgcgggaccctctcacagtggaatatccccacagcggctcaggccagacccaaaagcccctcagtgagccctccactgcagtcctgggcctgggtagcagcccctcccacagaggacagacccagcaccccgaagaagtcctgccagggggagctcagagccatgaaagagcaggatatggggtccccgatacaggcacagacctcagctccatccaggcccaccgggacccaccatgggaggaacacctgtctccgggttgtgaggtggctggcctctgtctcggaccccactccagacaccagacagaggggcaggccccccaaaaccagggttgagggatgatccgtcaaggcagacaagaccaaggggcactgaccccagcaagggaaggctcccaaacagacgaggaggtttctgaagctgtctgtatcacagtggggtatagcagtggctggtaccacagtgacactcgccaggccagaaaccccgtcccaagtcagcggaagcagagagagcagggaggacacgtttaggatctgaggccgcacctgacacccagggcagcagacgtctcccctccagggcaccctccaccgtcctgcgtttcttcaagaataggggcggcctgagggggtccagggccaggcgataggtcccctctaccccaaggaggagccaggcaggacccgagcaccgtccccattgaggctgacctgcccagacgggcctgggcccaccccacacaccggggcggaatgtgtgcaggccccagtctctgtgggtgttccgctagctggggcccccagtgctcaccccacacctaaagcgagccccagcctccagagccccctaagcattccccgcccagcagcccagcccctgcccccacccaggaggccccagagctcagggcgcctggtcggattctgaacagccccgagtcacagtgggtataactggaacgaccaccgtgagaaaaactgtgtccaaaactgactcctggcagcagtcggaggccccgccagagaggggagcagccgccctgaacccatgtcctgccggttcccatgacccccagcacccagagccccacggtgtccccgttggataatgaggacaagggctgggggctccggtggtttgcggcagggacttgatcacatccttctgctgtggccccattgcctctggctggagttgacccttctgacaagtgtcctcagaaagacagggatcaccggcacctcccaatatcaaccccaggcagcacagacacaaaccccacatccagagccaactccaggagcagagacaccccaacactctgggggaccccaaccgtgataactccccactggaatccgccccagagtctaccaggaccaaaggccctgccctgtctctgtccctcactcagggcctcctgcagggcgagcgcttgggagcagactcggtcttaggggacaccactgtgggccccaactttgatgaggccactgacccttccttcctttcctggggcagcacagactttggggtctgggcagggaagaactactggctggtggccaatcacagagcccccaggccgaggtggccccaagaaggccctcaggaggtggccactccacttcctcccagctggaccccaggtcctccccaagataggggtgccatccaaggcaggtcctccatggagcccccttcagactcctcccgggaccccactggacctcagtccctgctctgggaatgcagccaccacaagcacaccaggaagcccaggcccagccaccctgcagtgggcaagcccacactctggagcagagcagggtgcgtctgggaggggctaacctccccaccccccaccccccatctgcacacagccacctaccactgcccagaccctctgcaggagggccaagccaccatggggtatggacttagggtctcactcacgtgcctcccctcctgggagaaggggcctcatgccgagatccctgcagcactagacacagctggaggcagtggccccagggccaccctgacctggcatctaaggctgctccagcccagacagcactgccgttcctgggaagcctgggctccaccagaccacaggtccagggcacagcccacaggagccacccacacacagctcacaggaagaagataagctccagaccccagggcgggacctgccttcctgccaccacttacacacaggccagggagctgttcccacacagatcaaccccaaaccgggactgcctggcactagggtcactgccatttccctctccattccctcccagtgcctctgtgctccctccttctggggaacaccctgtgcagcccctccctgcagcccacacgctggggagaccccaccctgcctcgggccttttctacctgctgcacttgccgcccacccaaacaaccctgggtacgtgaccctgcagtcctcaccctgatctgcaaccagacccctgtccctccctctaaacacccctcccaggccaactctgcacctgcaggccctccgctcttctgccacaagagcctcaggttttcctacctgtgcccaccccctaacccctcctgcccacaacttgagttcttcctctcctggagcccttgagccatggcactgaccctacactcccacccacacactgcccatgccatcaccttcctcctggacactctgaccacgctcccctccctctcagacccggccctggtatttccaggacaaaggctcacccaagtcttccccatgcaggcccttgccctcactgcctggttacacgggagcctcctgtgcgcagaagcagggagctcagctcttccacaggcagaaggcactgaaagaaatcggcctccagtgccttgacacacgtccgcctgtgtctctcactgcctgcacctgcagggaggctccgcactccctctaaagatgagggatccaggcagcaacatcacgggagaatgcagggctcccagacagcccagccctctcgcaggcctctcctgggaagagacctgcagccaccactgaacagccacggaggtcgctggatagtaaccgagtcagtgaccgacctggagggcaggggagcagtgaaccggagcccagaccatagggacagagaccagccgctaacatcccgagcccctcactggcggccccagaacaccccgtggaaacagaacagacccacagtcccacctggaacagggcagacactgctgagcccccagcaccagccccaagaaacactaggcaacagcatcagagggggctcctgagaaagagaggaggggaggtctccttcaccatcaaatgcttcccttgaccaaaaacagggtccacgcaactcccccaggacaaaggaggagccccctgtacagcactgggctcagagtcctctctgagacaggctcagtttcagacaacaacccgctggaatgcacagtctcagcaggagagccaggccagagccagcaagaggagactcggtgacaccagtctcctgtagggacaggaggattttgtgggggttcgtgtcactgtgagcatattgtggtggtgactgctattcccacagtgacacaaccccattcctaaagccctactgcaaacgcacccactcctggggctgaggggctgggggagcatctgggaagtatggcctaggggtgtccatcaatgcccaaaatgcaccagactctccccaagacatcaccccaccagccagtgagcagagtaaacagaaaatgagaagcagctgggaagcttgcacaggccccaaggaaagagctttggcaggtgtgcaagaggggatgtgggcagagcctgagcagggccttttgctgtttctgctttcctgtgcagagagttccataaactggtattcaggatcaatggctgggagtgagcccaggaggacagtgtgggaagagcacagggaaggaggagcagccgctatcctacactgtcatcttttgaaagtttgccctgtgcccacaatgctgcatcatgggatgcttaacagctgatgtagacacagctaaagagagaatcagtgaaatgcatttgcagcacagatctgaataaatcctccagaatgtggagcagcacagaagcaagcacacagaaagtgcctgatgccaaggcaaagttcagtgggcaccttcaggcattgctgctgggcacagacactctgaaaagcactggcaggaactgcctgtgacaaagcagaaccctcaggcaatgccagccctagagcccttcctgagaacctcatgggcaaagatgtgcagaacagctgtttgtcatagccccaaactatggggctggacaaagcaaacgtccatctgaaggacaacagacaaataaacgatggcaggttcatgaaatgcaaactaggacagccagaggacaacagtagagagctacaggcggctttgcggttgagttcatgacaatgctgagtaattggagtaacagaggaaagcccaaaaaatacttttaatgtgatttcttctaaataaaatttacacccggcaaaatgaactatcttcttaagggataaactttcccctggaaaaactataaggaaaatcaagaaaacgatgatcacataaacacagtggtggttacttctactggggaaggaagagggtatgagctgagacacacagagtcggcaagtctcctaacaagaacagaacaaatacattacagtaccttgaaaacagcagttaaacttctaaatcgcaagaagaggaaaatgcacacacctgtgtttagaaaattctcagtccagcactgttcataatagcaaagacattaacccaggttggataaataagcgatgacacaggcaattgcacaatgatacagacatacattcagtatatgagacatcgatgatgtatccccaaagaaatgactttaaagagaaaaggcctgatgtgtggtggcaatcacctccctgggcatccccggacaggctgcaggctcactgtgtggcagggcaggcaggcacctgctggcagctcctggggcctgatgtggagcaggcacagagctgtatatccccaaggaaggtacagtcagtgcattccagagagaagcaactcagccacactccctggccagaacccaagatgcacacccatgcacagggaggcagagcccagcacctccgcagccaccaccacctgcgcacgggccaccaccttgcaggcacagagtgggtgctgagaggaggggcagggacaccaggcagggtgagcacccagagaaaactgcagaagcctcacacatccacctcagcctcccctgacctggacctcacctggcctgggcctcacctgacctggacctcacctggcctgggcttcacctggcctgggcttcacctgacctggacctcacctggcctcgggcctcacctggcctgggcttcacctggcctgggcttcacctgacctggacctcacctggcctgggcctcacctgacctggacctcacctggcctgggcttcacctggcctgggcttcacctggcctgggcttcacctgacctggacctcacctggcctgggcttcacctgacctggacctcacctggcctcgggcctcacctgcacctgctccaggtcttgctggagcctgagtagcactgaggctgtagggactcatccagggttggggaatgactctgcaactctcccacatctgacctttctgggtggaggcacctggtggcccagggaatataaaaagccccagaatgatgcctgtgtgatttgggggcaatttatgaacccgaaaggacatggccatggggtgggtagggacagtagggacagatgtcagcctgaggtgaagcctcaggacacaggtgggcatggacagtgtccacctaagcgagggacagacccgagtgtccctgcagtagacctgagagcgctgggcccacagcctcccctcggggccctgctgcctcctcaggtcagccctggacatcccgggtttccccaggcctggcggtaggtttgaagtgaggtctgtgtcactgtggtattactatgatagtagtggttattactaccacagtgtcacagagtccatcaaaaactcatgcctgggagcctcccaccacagccctccctgcgggggaccgctgcatgccgtgttaggattttgatcgaggacacggcgccatgggtatggtggctaccacagcagtgcagcccatgacccaaacacacggggcagcagaaacaatggacaggcccacaagtgaccatgatgggctccagcccaccagccccagagaccatgaaacagatggccaaggtcaccctacaggtcatccagatctggctccaaggggtctgcatcgctgctgccctcccaacgccaaaccagatggagacagggccggccccatagcaccatctgctgccgtccacccagcagtcccggaagcccctccctgaacgctgggccacgtgtgtgaaccctgcgagccccccatgtcagagtaggggcagcaggagggcggggctggccctgtgcactgtcactgcccctgtggtccctggcctgcctggccctgacacctgagcctctcctgggtcatttccaagacattcccagggacagccggagctgggagtcgctcatcctgcctggctgtcctgagtcctgctcatttccagacctcaccagggaagccaacagaggactcacctcacacagtcagagacaacgaaccttccagaaatccctgtttctctccccagtgagagaaaccctcttccagggtttctcttctctcccaccctcttccaggacagtcctcagcagcatcacagcgggaacgcacatctggatcaggacggcccccagaacacgcgatggcccatggggacagcccagcccttcccagacccctaaaaggtatccccaccttgcacctgccccagggctcaaactccaggaggcctgactcctgcacaccctcctgccagatatcacctcagccccctcctggaggggacaggagcccgggagggtgagtcagacccacctgccctcaatggcaggcggggaagattcagaaaggcctgagatccccaggacgcagcaccactgtcaatgggggccccagacgcctggaccagggcctgtgtgggaaaggcctctggccacactcaggggctttttgtgaagggccctcctgctgtgtgactacggtggtaactcccacagtgatgaaaccagcagcaaaaactgactggactcgcagggtttatgcacacttctcggctcggagctctccaggagcacaagagccaggcccgagggtttctgcccagaccctcggcctctagggacacccgggccatcttagccgatgggctggtgccctgcacaccgtgtgctgccaaacaggggcttcagagggctctgaggtgacttcactcatgaccacaggtgccctggtcccttcactgccagctgcaccagaccctgttccgagagatgccccagttccaaaagccaattcctggggccgggaattactgtagacaccagcctcattccagtacctcctgccaattgcctggattcccatcctggctggaatcaagagggcagcatccgccaggctcccaacaggcaggactcccacacaccctcctctgagaggccgctgtgttccgcagggccaggccgcagacagttcccctcacctgcccatgtagaaacacctgccattgtcgtccccacctggcaaagaccacttgtggagcccccagccccaggtacagctgtagagagagtcctcgaggcccctaagaaggagccatgcccagttctgccgggaccctcggccaggccgacaggagtggacgctggagctgggcccacactgggccacataggagctcaccagtgagggcaggagagcacatgccggggagcacccagcctcctgctgaccagagacccgtcccagagcccaggaggctgcagaggcctctccagggggacacagtgcatgtctggtccctgagcagcccccaggctctctagcactgggggcccctggcacagctgtctggaccctccctgttccctgggaagctcctcctgacagccccgcctccagttccaggtgtggttattgtcagggggtgccaggccgtggtagagatggctacaattaccacagtggtgccgcccatagcagcaaccaggccaagtagacagacccctgccacgcagccccaggcctccagctcacctgcttctcctggggctctcaaggctgctgtctgccctctggccctctgtggggagggttccctcagtgggaggtctgtgctccagggcagggatgactgagatagaaatcaaaggctggcagggaaaggcagcttcccgccctgagaggtgcaggcagcaccacagagccatggagtcacagagccacggagcccccagtgtgggcgtgtgagggtgctgggctcccggcaggcccagccctgatggggaagcctgccccgtcccacagcccaggtccccaggggcagcaggcacagaagctgccaagctgtgctctacgatcctcatccctccagcagcatccactccacagtggggaaactgagccttggagaaccacccagccccctggaaacaaggcggggagcccagacagtgggcccagagcactgtgtgtatcctggcactaggtgcagggaccacccggagatccccatcactgagtggccagcctgcagaaggacccaaccccaaccaggccgcttgattaagctccatccccctgtcctgggaacctcttcccagcgccaccaacagctcggcttcccaggccctcatccctccaaggaaggccaaaggctgggcctgccaggggcacagtaccctctcttgccctggctaagacagggtgggcagacggctgcagataggacatattgctggggcatcttgctctgtgactactgggtactggctctcaacgcagaccctaccaaaatccccactgcctcccctgctaggggctggcctggtctcctcctgctgtcctaggaggctgctgacctccaggatggcttctgtccccagttctagggccagagcagatcccaggcaggctgtaggctgggaggccacccctgtccttgccgaggttcagtgcaggcacccaggacaggaaatggcctgaacacagggatgactgtgccatgccctacctaagtccgcccctttctactctgcaacccccactccccaggtcagcccatgacgaccaacaacccaacaccagagtcactgcctggccctgccctggggaggacccctcagcccccaccctgtctagaggagttggggggacaggacacaggccctctccttatggttcccccacctggctcctgccgggacccttggggtgtggacagaaaggacgcctgcctaattgtcccccaggaacccagaacttctctccagggaccccagcccgagcacccccttacccaggacccagccctgcccctcctcccctctgctctcctctcatcactccatgggaatccagaatccccaggaagccatcaggaagggctgaaggaggaagcggggccactgcaccaccgggcaggaggctccgtcttcgtgaacccagggaagtgccagcctcctagagggtatggtccaccctgcctggggctcccaccgtggcaggctgcggggaaggaccagggacggtgtgggggagggctcagggccctgcaggtgctccatcttggatgagcccatccctctcatccaccgacccgcccacctcctctccaccctggccacacgtcgtccacaccatcctgagtcccacctacaccagagccggcagagccagtgcagacagaggctggggtgcaggggggccgccagggcagctttggggagggaggaatggaggaaggggaggtcagtgaagaggcccccctcccctgggtctaggatccacctttgggacccccggatcccatcccctccaggctctgggaggagaagcaggatgggagaatctgtgcgggaccctctcacagtggaatacctccacagcggctcaggccagatacaaaagcccctcagtgagccctccactgcagtgctgggcctgggggcagcccctcccacagaggacagacccagcaccccgaagaagtcctgccagggggagctcagagccatgaaggagcaagatatggggaccccaatactggcacagacctcagctccatccaggcccaccaggacccaccatgggtggaacacctgtctccggcccctgctggctgtgaggcagctggcctctgtctcggacccccattccagacaccagacagagggacaggccccccagaaccagtgttgagggacacccctgtccagggcagccaagtccaagaggcgcgctgagcccagcaatggaaggcccccaaacaaaccaggaggtttctgaagctgtctgtgtcacagtcgggtatagcagcggctaccacaatgacactgggcaggacagaaaccccatcccaagtcagccgaaggcagagagagcaggcaggacacatttaggatctgaggccacacctgacactcaagccaacagatgtctcccctccagggcgccctgccctgttcagtgttcctgagaaaacaggggcagcctgaggggatccagggccaggagatgggtcccctctaccccgaggaggagccaggcgggaatcccagccccctccccattgaggccatcctgcccagaggggcccggacccaccccacacacccaggcagaatgtgtgcaggcttcaggctctgtgggtgccgctagctggggctgccagtcctcaccccacacctaaggtgagccacagccgccagagcctccacaggagaccccacccagcagcccagcccctacccaggaggccccagagctcagggcgcctgggtggattctgaacagccccgagtcacggtgggtatagtgggagctactaccactgtgagaaaagctatgtccaaaactgtctcccggccactgctggaggcccagccagagaagggaccagccgcccgaacatacgaccttcccagccctcatgacccccagcacttggagctccacagtgtccccattggatggtgaggatgggggccggggccatctgcacctcccaacatcacccccaggcagcacaggcacaaaccccaaatccagagccgacaccaggaacacagacaccccaataccctgggggaccctggccctggtgacttcccactgggatccacccccgtgtccacctggatcaaagaccccaccgctgtctctgtccctcactcagggcctgctgaggggcgggtgctttggagcagactcaggtttaggggccaccattgtggggcccaacctcgaccaggacacagatttttctttcctgccctggggcaacacagactttggggtctgtgcagggaggaccttctggaaagtcaccaagcacagagccctgactgaggtggtctcaggaagacccccaggagggggcttgtgccccttcctctcatgtggaccccatgccccccaagataggggcatcatgcagggcaggtcctccatgcagccaccactaggcaactccctggcgccggtccccactgcgcctccatcccggctctggggatgcagccaccatggccacaccaggcagcccgggtccagcaaccctgcagtgcccaagcccttggcaggattcccagaggctggagcccacccctcctcatccccccacacctgcacacacacacctaccccctgcccagtccccctccaggagggttggagccgcccatagggtgggggctccaggtctcactcactcgcttcccttcctgggcaaaggagcctcgtgccccggtcccccctgacggcgctgggcacaggtgtgggtactgggccccagggctcctccagccccagctgccctgctctccctgggaggcctgggcaccaccagaccaccagtccagggcacagccccagggagccgcccactgccagctcacaggaagaagataagcttcagaccctcagggccgggagctgccttcctgccaccccttcctgccccagacctccatgccctcccccaaccacttacacacaagccagggagctgtttccacacagttcaaccccaaaccaggacggcctggcactcgggtcactgccatttctgtctgcattcgctcccagcgcccctgtgttccctccctcctccctccttcctttcttcctgcattgggttcatgccgcagagtgccaggtgcaggtcagccctgagcttggggtcacctcctcactgaaggcagcctcagggtgcccaggggcaggcagggtgggggtgaggcttccagctccaaccgctccactagccgagactaaggaagtgagaggcagccagaaatccagaccattccatagcaaatggatttcattaaagttaccagacttcagtgtaagtaacatgagccccatgcacaacaatcccttatgaaggggaagtcagtgtcgcctcggatttcttgaaaaacacaaaaacttatcaatgcctgtaaaagtctgttggaaagaaaatatgattcaagaatgttatgcccaacaaagctggcatattttctacccggacacactcagggaatgtggtcgcttgagtgcttctctcactgcgtaaatcctacgtggtgtttaagcatattcataaatgtgtatgtctatttttatgtgtaagatggttcatttttattttatttattcaatatgtacaataaagaatattgacaaataggctggacatggtggctcccacctgtaatcccagccctttgggaggccgaggcgggcagatcacctgaggtctggagttcgagaccagcctggccaacatgatgaaaacccatctctactaaaaatacaaagattagccaggcatggtggtgcatgcctgtaatcccagccactcaggaggctgagacaggagaaatgcgtgaacccggaaggcggaggttgcagtgagccgagatcacaccactgcactccagcctggcgacagagcaagattccatctcaaaaaaaaaagacaaagaaatttgtttttttgaataaagacaaatttcatcacacgaagataaagatgcaaagctccagacaggaaggcacggacagcacagtgaagcctggagcgggcgctggggggccaggggcatggcgggggtgccagcgtctctcagtgcctaccatggccactccagcctgtgttctcacgaggatggctgtgcaatgctaggagcgtgttcgaagctctagggcaaccactggaagtgaggctgaggagcagagcccagaggcccgtggagctgatgaaaagaaagctggagaaagtgtttgctgcctcccaacatggtaagaaaagatagaaagagagagcacacggcaaagggagcttgctgagggactctttacaatggcttgcacagagctcagggggtctgggaggctagggccctgcgcagggcagtcaccccagcctgctgaccaaggtttgctgcaggcagctctgggggtggttgaggcgcggtccctggagccacccctcaagggaacgaggcagcagagtgggccaaggcccaggtcggctgcaaggctgcccaggacttggggtccttacatcagcagccactgatgcagctggcccagagagaggcgccgagcaggttgcctccaggggacaaaccaggtcggagagggtgaggcagtggatggagccacaacaaccccgggcacgggtgacacgcacgttcatgcacatctgacccttcctccctcaccaaacaggtccccctgccttccccatggttgcgaaaaagcaaaatgtagacgttttttcttttttaattcatgttttaattgacaaatgaagccgtatatatttattgtgtacaacatgatgctttaaaatatgtatacatcgtggaacagcaacgtcgagctaatttaacacgcattacttcacatacttgtcatcttttgtggcgagaatgcttaaaatccactctcttagtattttttaagaatgcaatacattgttgtcaactgtggtcaccgtcatgcatagccaagctcccgacctcaccctcctgccagctcaggctgtgcatcctttcaccagcatcccccaccccggcccctggccctggtaactaccactctatactctacgtatgagttcagctttttaagattccacagatgaatgagatcatacagtatttgctttctatgcctggcttattttagttaacacactgtcctccagatccatccgttgttgcaaatgacagggtttcattctttttaaagtctaaagagtattccattgtgtcaatggacctcatttgctttatccatgcatcaactatggacatttaggttgattccatttcttagctgttgtggatggtgctgcagtaaacatggggctgcagatgtctcttcaacatactgacatcatgtcctttggataaatacccagtagtgggatcgctggatcacaatgtacagttttttttttaatggaaactttcattttttggtgaaattaggaaaacagataaaacccacagaatccaaaatatatgtgaagatgccaaaaacagttgacattgggcagaggtcacatggaaggaagtgaatacatgacggggtgtgagggcccagaggcagctgaaatacgctttctaaacacaaggacctcttctgagagggcagaagttttatcctgcacatgcaatgaccagcacagctaaaatacactttctaaacatgaggacctcttctgagagggcagctttatcctgcaaatgcaatgaccagcacaggacccagaataaagagagttgccagcggacgcctggtgtccatgtgtccaggtgagttcgagatgcggacggcgctggccagccagtcacaccctaagtcaatctgctgcatgcatttgtccttgccacagcagaaaacgagaaagcctttgggctgcaaagcttcacaggctcctcttctcccgactccatggaaacagctacaaagagcaggcccagtagagcttaattcatgaaaatgagtaataaacttgaactggaacagtatcgactttttagaaacggcagcaaagtgtataaaaaatattcaccagaacaatatttccaaacgatgagatgagaatttcagccaagtaatcctccatggatagaaaataatgaagggattggatttatgaaggaaaatcatggagctcaaatacaagagaagagaatcaaaaatgaacaggaggagataaaatatggtttggccaaagttacaaaataaattttttaaaaacccttcatcatggcaagtagaaagagcgagaggaaaaacagatcccgtggaagacacaaataggacatggggagaaaaatgaatgagatgaaacagagcagaaataaaattttacggaactaaagacaagtgatctgaacctgcctggggcctgggggacctcgccaccctgaagggaaagaacatgcctggctggctttgccacctgctcattgcagagccccacagcttgcaacaaacataggcggtagccagggagtggttacagcaggccttgagcaagacccagtgttgtgctgacttcaggtctgacccagcactgtcatagtggtggtgtccatagtggtagtgggggtgcttgtgtcactccacccccatctccaggaggctcagaacagacagagagagactccatttgtttgggagaaagtaagggatgagaacaagagtctctgcctggtaatccagagaattattctagatcttggccaagattatcaaagcagtacctctatgagtcttttgggcttggagtccccctaaagcagatatagctaagatcacaacacccaagtccttttgaatatgtgggaagacttcccaaggacaggagcaaacaaacaagcccagactgcaaaaaaacaagcccagactgcaataaacacctcactcttcaatgcccaggcactgaagaacatctcctagcagcaacaccatccaggaaaacatggcctcaaccagtgaactaaataaggcaccagggaccagtctcggagaaatagaggtatgttatctttcagagaattcaaagtagctttgttgaggaaactcaaagaaattcaagataacacagtgaaggaattcagaatcctatccgataaatttaacagagattgaagcaattaaaaagaattaagcagaaattatggagctgaaaaatgcaattggcatactgaaaaatgcatcagagtattttcatagcctcatatatcaagtagaagaaagaattagtgagcttgaaaacaggctatttggaaaagcacgataaaaggagacaaaagagaaaagaataaataacaatgaagcatatctacaggatctagaaaatagcctcaaaaggccaaatctaagaattattagccttaaagaggaggtagagaaagagggatggagagtttattcaaagggataataacagaaaacttcccaaacctagagaaagatatcaatatccaaatgcaagaaggatgtagtacaccaaggagatttaatgcaaagaagactacctcaaggcattcaatactcaaactcccatatgacaaggactttaaaaagatcctaaaagcagcaaaagaaaagaaatgaataaaatactatggagctccaatatgtctggcagcagacttttcagtgaagactttatatgccaggagagagtgtcataatggatttaaagtgctgaaggaaaaaacttttaccctcgaacagtatagctggtgaaattatccttcaaacatgaaggagaaataatttgtttccagacaaatgttgagggatttcatgaacaccagacctgtcttttaagaaatgctaaagggagtacttcaatcagaaagaaacacgttagtgaacaataagaaatcatctgaaggcacaaaactcaccggtaatagtaagtacacagaaaaacacagaatattataacactgtaactgtggtgtgtaaactccttttgtttgtttgtttgtttgtttgtttgtttgtttttgtttttagacggagttttgctccagcccaggctggagtgcaatggcacaatctcagctcactgcaacttccacctcctgggttcaagcaattctcctgcctcagcctcccaagtagctgggattacaggcatgtgctaccatgtccagctaattttgtattttagtagagacggtgtttcaccatgttggtcaggctagccttatcttgagtagaaaaactaaatgatgaagcaatgaaaaataataactacaacttttcaagacatagtacaataagatataaatcataacaaaaagttaaaaggtggagggatgaagttaaggcatagagtctttattagttttctttttacttgtctgtttatgcaaacagtgttaagttgtcatcagtttaaaataatgggtcataagatactatttgcaagcctcatggtaacgtcaaaccaaaagcaatacaacagatacacaaaaaacaaaaagcaagaagctaaattacgtcatcagagaaaatcaccttcactaaaaggaagacggagaaaagaatgaagagagagaagaccaaaagcaaatagcaatatggcaggagtaagtccttacttatcaataataccattgaatgtaaatggactaaactctccaatcaaaagacatagagtggctgaatcaattaaagaaaaaacaagacccattgatctgttgtccacaagaaacacactttatctataaagacacacatagactgaaaacaaagggatggaaaaagatactccacgccaatggaaaccaaagaaagagcaggagtagctacacttatatcaggcaaaatagatttcaagacaaaaactataagaagagacaaggtcactaatgataaacaggtcaattcagcaagaggatataacaattgtaaatatatatgcacccaatgctggagcacccagatatataaagcaagtatttactagagctaaagagagaaatagactccaatgcaataatagctggagatttcaacatcccactttcaacattgaacagatcctccagatagaaaatcaacaaagaaatattggacttaatctgcactatcgaccaaatggatctaacagatatttacagaacatttcatccaacagctgcagaacacacattcttttcctcagcacatagatcattctcaaggatagaccatatgttgggtcacaaaacaagttttaaaatattcaaatacattgaaataatatcaagcatcttctgtgaccacaatggactaaaactagaaatcaataacaagaggaattttggaaactatataaatatatggaaattaatgaatgctgagtgggtcaatgaagcaattaagaaggaaactgaaatttttcttggaacgaatgatcatggaaacagaaaataccaaaacctatgggatacagcaaaagcagtactaagagggaagtttacagctacaaatgcttacattaaaaaagaagaaaaacttcaataaaaaaacctaacaatgcatcttaaagaactagaaaagcaagaggaaatcaaatccaaaattagtagaagaaaacagtaaaggtcagagcagaaataagtaaaattgaaatgaagaaaacaatacaaaagatcaataaaacaacaggttgttttcttgaaaagttaaacaaaattgacaaacctttagccagactaagaaaaaaagacagaagatccaaataaataaaatcagagatgaaaaaggtgacattacaacttacaccacagaaattcaaaggatcattagtggctactataagcaactatatgccaataaattggaaaatctagaagaaatgcagaaattcctagacacatacaacctcccaagattaaaccaagaagaaattcaaaacctgaacagactgataacaagtaatgagatcaaagccgtaataaaaagcctcccagtaaagagaagcccaggacccgacggcttcactgctgaattctaccaaacatttaaagtagaactaataccaatcctactcaaactattccaaaaaatagaggtggaaggaatacttcaaaactcattatacgaggccagtattaacctgacaccaaaactagacaaagacacatgaaaaaaagaaaactacaggccaatatgtctgatgaatattgacacaaaaatcctcaacaaaatactagcaaaccaaattcaactacacattagaaagttcactcatcatgaccaagtggaatttatctaacttgggatgcaaagatggttcaacatatgcaaatcaatcaatgtgatacatcatatcaacagaatgaacaacaaaaaccatttgatcatttaattgatactgaaaaagcatttgataaaattcaacattccttcataataaaaattctcttctatactaggtacaaaagaaacttacctcaacataataaagccatatatgacagtcccacagtatgatactaaatgaggaaaaactgagagcctttcctctacgatctggaacatgacaaagatgcccactttcatcactgttattcaacatagtactggaagtcctagctggagcgatcagacaagagaaagatataaaaggcatccaaattggaaaggaataagtcaaattatcctcatttgcatatggtatgatcttctatttagagctaactaaagactccaccaaaaaaagttattagaactgacgaacaaattcagtaaagctgcaggatacaaaatcaacatacaaaaatcagtagcatttctatatgccaacaatgaccaatgtgaaaaagaaattaaaaagtaaccctatttacaataaccacaaataaacacctaggaattaaccaaagaggtaaaagatttctgtaatgaaaactataaaacactgatgaaagaaattgaagagtacaccaaaaaatggaaagcaattgcatgttcatggattagaagaatcagtgttgttataatgtccatactatccaaagcaatctacagattcaatgcaatccttatcaaaataccaatgacatcattcacagaaatagaaaaaaaaaatcctaaaatttacgtggaaccacaaagacccagaatagccaaagctctcctaagcaaaaagaacgaaactgtaggaatgacattgcctgtcttcaaattctactacagagctatagatagtaaccaaaacagcgtggtactagcataaaaacagacacagagacaaacagaacaaaatttaaaaacccagaaataaatccacacacctacagcaaattcatttttgacaaagttgccaagaacatactctggggaatagataatgatatctcttcaataaataatgtggggaaaactggatatccatatacataacagtgaaactagacccctctctctctcactatatacaaaaatcaaatcaaaattgtttaaggacttaaatctaagacctcatactatgaaaccactgcaagacaaccttggcggaaactctccaagacatcagtccaggcaaagatttcttgagtaatatcccacaagcacagacaaccaaagcaaaaatggacaaatgggatcacatcaagttaaaaagcttctgcacagtaagggaaacaaccaacaaaatgaagagacaacccacagaatgggagaaaatatttgaaaaatacccatctggcaagggattaaaaaccagaatatatgcagaatatataaggagctcaaacagtgctatagaaaaaaaaatctaataatctgatttaaaaatgggaaaaatgttagaatagacatttcttaaaataagacatacagatggcaaaccgacatggaacggtgctcaacatcatggattatcacagaaacacaatcaatcaaaactaaaactaaaatgtgctatcatctcaccccagttaaaatggctgatatccagaagacaggcaataacaaatgctggcaaggatgtggggaaaagggagcccccatacactgttgctgggattgtaaattagtacaaccactgtggagagcagcatgaaagttcctcaaaaaactgaaagaaagctaccataggatccagcaatcccactgctgtgtatatactacaaaagaaaggaagtcagtatatgaagaggtatctgcactcccatgtttgttgcagccctgttcacaacagccaagatttggaagcaacctaagtgtccatcagcagttgaatgtataaagaaaatgtggtgcatatacacaatggagtattattcaataataaaaaggaatgagattgagtcatttgcaacaacatggatggaactggagatcattatgtgaagtgaaataagccaggcacagaaagacaaacattacaatgttcttacttattaatgagatctaaaaatcaaaacaattgcacccatgttcataaagagtaaaaggatggttaccagatgctgagaacggtggtggggggatagggaaaggtggcagtggttaacgggtacaaaaaaatagaaagaatgaataagacttactacttgatagcacagcaaggtggctatagtcagtaatttagttgtatatttttaataatgaaaggtgtataattggattgtttctaacacaaaggataatgcttaagaggatggataccccattttccatgatgtgattatttcacattgcacgcctagatcaaaacatccaatgtaccccataaatatatacatcttctatgtacccataaaaattctgtaaaataaaatatataaaaagaggtgacagatatggaagacaggcaaagaagagacgacatccacataatccgagtacctaagaaagaatggagtccagtgcatctcaggagccaccattctaagccaattttctctggttctctcagtcaccctaccaatacgtgggcaatcttgttttatttcaggatagagtttttgaaattatagatttaagtatgctttctgttctattacttttggtaattaattttagaaagaactaatttgggcacaaatttgaaaaaattctaaatccaaaaaaaaaaagaaaaaaacacacacacaatcatctataagggggatgatgaccagtcctagatttctcaccagccacattcaagatcagtaaatggtaggacaaaacctgtagggtccttaagggggaaagaagtagtggatagtccagagtctatatacagccaactgttcttgaagaaaaaaggctgctgaaaaggagttccaaacattctataatccataatctcatgatgaaactactagaggaagaccaccagccatcaaaaggtgcttggagaacccagggccaagaaccaaaagtaaatattaagtgtccttaactgcgagactaagatagaaatgactgtgggggaccatgtggcctcaacagaggtgaaatggtgtctgcctgacaaagtggacattttacaatgatcaaaacacagaatatgagatagagagcacttctgaattactgcctcactccaaataactctcagccaaaggacttcagtaaaaccaaattgggcatattagacagtacaaacaaattctaagaaaataatattactgattacaatcacatgatgctagagatggaggggaaaaggaagaggaaaccaggtaatttcatactcgtatatagtaaagaactaaagtacattgtccaaagaagaacaaagaatattttggaaagttataaaggtagccactacacatagaagatagcaaagaacaagaaaacttaagatggaaaactttttggaagcataaaaatagaaaatataaactactaagataagattgaagccaaacagatctatgaaaacaacaaacatcaatggccttaacttgcctattaaaaggaagagactttcaaattggaccacaagataaaacccaactctatatagcatatgagtattacacacaaaatgggaaaagctgaaaaaacttgggcaaaattcaccccaagcaaattccactgtttcctttgggacaaaatgccaagctccatgccagggaagatgattctcctcagaccttctcctcactctcccagtcctcttagggaaggaattgggtgttagaggagggagactctgtcgattatcagctgaagcagtggtgtgctcctgcgttgcttctgacctgggaaatgaagcagcaagactctttctgctgtgtctttgcccagaagggccatccccccagagcagagtacccaggccggcaggagcagtggtggaagcgtggaaaccacgtctcctacagcagagaccatcagaagcggagcctcgggtataagggaaacaacgcgttctccctaacctgggagtgacagacagcgtcattcctcacagtgataccctgtgttctagccatctggcccatgacagagccagcccagagccagcccagagccagcccctcaccaacctggagcctggccagctcgccaagctgcaccataggcctggaaggcgtggagacctgcggcagtgccctgtcctcccgtgaggcctgccatccctgccaggggtcgcctctggcttctccttctccaggaccgcacggtccagaggctcagtgcctggagtaggtgttgcccccctgcttctaggcccagaccctcccttgttcctgaccccgggcctttccctctggcttggacatccagggccctgtctcagctggggagctgctcctgctcaaggactgtcttccgcgggatcgaaaggccgcgtcctgaacaatgcgtgggccacgtgagcggagcaggctctaaaggccgcgtcctaaacagtgcgtgggccacgtgagcggagcaggctctaaaggccgcgtcctaaacagtgcgtgggccacgtgagcggagcaggctctaaaggccgcgtcctaaacagtgcgtgggccacgtgagcggagcaggctctaaaggccgcgtcctaaacagtgcgtgggccacgtgagcggagcaggctctaaaggccgcgtcctaaacagcgcgtgggccacgtgagcggagcaggctctaaaggccgcgtcctaaacagtgcgtgggccacgggagcggagcagactctaaaggccgcgtcctaaacagtgtgtgggccacgtgagcggagcgccctctccactgccctcggggccgcagctcccagctcagctcccagccctgctcagggcagccaggccaggaggtaccatccaggctaagtgaccctcaggggggacaggtgccccaggagatgccagctgttgggagaggctgggggaccaactcgacctggcctgtgggccctgccctggccacccattgtaggatccagccgccacgcctgtgacactcgtgtgctttccctggtgtgtgcttgtggcaggtgggggcagagggtcctcaggccagagagccactcccccagcgccagaccaccctcttcctcactcccccacctcaccccctcacaggtgcctcccaggccatcagggcccaaccacccctaaacaaatgggttctcggcccctcgtggctggaggtgggttctctcaccattcccagcctaagactccatccccatgctggcagctgttcaaccatgtctagagagatccactgtcccagacagcacctcagggtcccccgtcctgcctggaaccctgtaggaaactccacaaaccgccgccattctgtccacacccctacaggagccccaaccctctccccacatccaggcttccctcccagacccctcatccctgcccgcacggtgcctgagggggccttcttgggcagcgcctaagcaagcccccagcacccttcggccccttcaaggcacacaggccccctttccacccagcctcaggaaaccacctgtgtcctccaacgacaggtcccagcctcccagcctttgccttgcctgttcctctccctggaactctgccccgacacagaccctccccagcaagcccgcagggcacctcccctgcccccagacaccctgtgcccatcagttcatccccagcagaggccctcaccaggcacacccccatgctcacacctggccgcaggcctcagcctccctgagggccccacccagcccgcgtctggccagtggtgcgtgcaaagcccctcacccagactcggcggaaggcagccagtgcaggcctggggaggggctctccttagaccaccttgcaccttccctggcacccaccatgggaagagctgagactcactgaggaccagctgaggctcagagaagggacccagcactggtggacacgcagggagcccacgccagggcgccgtggtgagtgaggcccagtgccacccactgaggcctcccgttcagtgggacgacggtgaacaggtggaaccaaccaggcaacccccgccgggccccacagacgggatcagagcaggaaaggcttcctgcccctgcaggccagcgaggagccctggcgggggccgtggccctccaggcgaggaggctcccctggccaccgccacccgggcctctctgctgctgggaaaacaagtcagaaagcaagtggatgagaggtggcgtgacagacccagcttcagatctgctctaatttacaaaagaaaaggaaaaacacacttggcagccttcagcactctaatgattcttaacagcagcaaattattggcacaagactccagagtgactggcagggttgagggctggggtctcccacgtgttttggggctaacagcggaagggagagcactggcaaaggtgctgggggcccctggacccgacccgccctggagaccgcagccacatcagcccccagccccacaggccccctaccagccgcagggttttggctgagctgagaaccactgtgctaactggggacacagtgattggcagctctacaaaaaccatgctcccccgggaccccgggctgtgggtttctgtagcccctggctcagggctgactcaccgtggctgaatacttccagcactggggccagggcaccctggtcaccgtctcctcaggtgagtctgctgtctggggatagcggggagccaggtgtactgggccaggcaagggctttggcttcagacttggggacaggtgctcagcaaaggaggtcggcaggagggcggagggtgtgtttttgtatgggagaagcaggagggcagaggctgtgctactggtacttcgatctctggggccgtggcaccctggtcactgtctcctcaggtgagtcccactgcagccccctcccagtcttctctgtccaggcaccaggccaggtatctggggtctgcagccggcctgggtctggcctgaggccacaccagctgccatccctggggtctccgccatgggctgcatgccagagccctgctgtcacttagccctggggccagctggagcccccaaggacaggcagggaccccgctgggcttcagccccgtcagggaccctccacaggtagcaagcaggccgagggcagggacgggaaggagaagttgtgggcagagcctgggctggggctgggcgctggctgttcatgtgccggggaccaggcctgcgctttagtgtggctacaagtgcttggagcactggggccagggcagcccggccaccgtctccctgggaacgtcacccctccctgcctgggtctcagcccgggggtctgtgtggctggggacagggacgccggctgcctctgctctgtgcttgggccatgtgacccattcgagtgtcctgcacgggcacaggtttgtgtctgggcaggaacagggactgtgtccctgtgtgatgcttttgatatctggggccaagggacaatggtcaccgtctcttcaggtaagatggctttccttctgcctcctttctctgggcccagcgtcctctgtcctggagctgggagataatgtccgggggctccttggtctgcgctgggccatgtggggccctccggggctccttctccggctgtttgggaccacgttcagcagaaggcctttctttgggaactgggactctgctgctggggcaaagggtgggcagagtcatgcttgtgctggggacaaaatgaccttgggacacggggctggctgccacggccggcccgggacagtcggagagtcaggtttttgtgcaccccttaatggggcctcccacaatgtgactactttgactactggggccagggaaccctggtcaccgtctcctcaggtgagtcctcacaacctctctcctgctttaactctgaagggttttgctgcatttctggggggaaataagggtgctgggtctcctgccaagagagccccggagcatcctggggggctcaggaggatgccctgaggcaacagcggccacacagacgaggggcaagggctccagatgctccttcctcctgagcccagcagcacgggtctctctgtggccagggccaccctaggcctctggggtccaatgcccaacaacccccgggccctccccgggctcagtctgagagggtcccagggacgtagcggggcgccagttcttgcctggggtcctggcattgttgtcacaatgtgacaactggttcgacccctggggccagggaaccctggtcaccgtctcctcaggtgagtcctcaccaccccctctctgagtccacttagggagactcagcttgccagggtctcagggtcagagtcttggaggcattttggaggtcaggaaagaaagccggggagagggacccttcgaatgggaacccagcctgtcctccccaagtccggccacagatgtcggcagctggggggctccttcggctggtctggggtgacctctctccgcttcacctggagcattctcaggggctgtcgtgatgattgcgtggtgggactctgtcccgctccaaggcacccgctctctgggacgggtgccccccggggtttttggactcctgggggtgacttagcagccgtctgcttgcagttggacttcccaggccgacagtggtctggcttctgaggggtcaggccagaatgtggggtacgtgggaggccagcagagggttccatgagaagggcaggacagggccacggacagtcagcttccatgtgacgcccggagacagaaggtctctgggtggctgggtttttgtggggtgaggatggacattctgccattgtgattactactactactactacatggacgtctggggcaaagggaccacggtcaccgtctcctcaggtaagaatggcctctccaggtctttatttttaatctttgcctatggagttttcagagtattgcatactaaccccggagatgtgtcaagctggccgggagaagctagggactaaactgcctaggggatctcagagccttggggataaactaagaatctctttgatggtgttggtagagtccctaaatgatggagcagggattttggagcctcatttgagggagatgctaaaaagattccatggctaaagggatagtttgggctgtggttggagattttcagtatttagagtaatagtgttagctgagaaatataattcaggaccctctgagacagcatctgtacagtatctgatgcacagggacaaagagtggagtgggacactttcttcagatttgtgaggaatgttctgagtagattgtttaaaacatcatttgttgaaaagagaacttttagtgaatcaatcaaggaaggaaggaaggctcagtctcaaaagggtagctgatatccagaggaatctggataagcctgcaaaagtctagctttcaaaggaatgcagaagtatgcatgtggaaaattagaagatttttttttacccttaaagtggttcctatgatagttagaatactgtgactttactatgtgagagagttttcaagtattcacttttttttttaaatgtccaagtacgaaaaaattttgtcagtttgaagtcaggtttgtacagaattgatattgttgaaagtttaaccaaagaatgggaatgaggctctttcacaccctattcagaactgacttttgacaataataaattaagtttaaaatgtttttaaacaaattgagcaatgttgagttgcagtcaagatggccgatcaggaccaggacacctgcagcagctggcaggaagcaggtcatgtggcaaggctattttgggaagggaaaataaaaccactaggtaaacttctagttgtggtttgaagaagtggttttgaaatgctctgtccagccacgcagaactgaaagtccaggctgagaaaaacaacacctggataatttgcatttctaaaataagttgaggattcagtcgaaactggaaaggtcctcttttaacttagtgagttcaatcttttaattttagcttgagaagttctagtttccctcaaacttaagtttatcgacttctaaaatatattcattttcaaaattaagttatgtaaaaaaattgaaggacttcagtgtctttaatttctaatgtatttagaaaactttttaaagttactttattattcttccctctgattattggtctctgttcaattcttttcccagtacccaaagcatttacagtgactttgttcataattttttttaagttagttgttttctgccttactattaagactttagcattctggtcgaagtggcttcataaatctttttcaaggccactttttaggagaaagacatcttttttttaatgaatgcaattatctagaattatttcagttaaacatgttagttggtggttgagaggacactcagtcagtgcagaaggtctgtaagccagtccacagagacattcctgggtgaactccctctggccctgcttcttgttggagaactggccagaggtctgagaccaggctgctgctgggaaggcctggactttggtctcccagtaccgcccagacctggggatgtatggttgtggcttctgccacccatccacctggctgctcatgaaccagccagtcttgatggctttgaaggaatgattccacacaaagactctggacctccctgaaaccaggcactgcaaacggtaagccagcggcagccacagctgtggccgctgtccttaaaccttgtaattgtttctgcttgattgagtcttaagtcattgctttaggaggagaaagagacatttgtgtcttttgagtaccattgtctgggtcactcgcatttaactttccttgaaaaacttataagagaaaaacgttgcctgttaaccattaactacagggctcgtgatactttgagaaaatcttagaaaaaaatgtatacagttgtctggaattatttcaatgaagtgtattagttggggtactggcgctgtctctacttcagttatacatgtggttttgaattttgaatctattttgtctcttcttaagcaccaagtatagatacagtggatacactcactggtttttaacggtggttttaatctagaaggaatttaaactggaggctaatttagaatcagtaaggagggacccaggctaagaaggcaatcctaggattctgaaagaaaagatggttttagtttttatagaaaacactactaccattcttgatctacaactcaagacggtctaatgaattttgaagttactggtaaatatacttcctggttgttaaggaatgattatcaaatggatcagtgcttggatctgaggtcagtgtgagaggacagggcctgggctgtggatatacagaaggaaggccacagctggatagaattgaaaaagaatggagacctgctgctgaggcaagcagatcagccggactctttccagccatagcaaagaaccagattaataaagagaaggccagattaataaagcttgctgagcaaaatttagtgaacaaggttgacagcctggctaggaagctaggctctagttaagcacagttggactgagatgtgtaggcttccctgagcccttcaaaaatgtgctaagctgagatgattactctgaggtagccaaagctggacttgagcaggaacgaggtagactgcaatgagctgaattgagctaggccggctaagctaaactaggctgacttaaccaagatagccaaattggaatgaattgtcttgatctgggctgattggagctaaactctactggactgctctgaactgagctgtgttgggctgtgttgtgctggggtgagctgagctagcatgagctactctgtggtagctggggtgagctgggatgagctgagctgggtgagctgagctgggtgagctgagctgggttagctgagctggggtgagctggggtaagctggggtgagctgagctgggtgagctgagctgggtgagctgagctgagctgggtgagctggggtaagctggggtgagctgggctgacctgaggtggttgagctgagctgggtgagcagagctgaggtgagctgagctgagctgggtgagcagagctggggtgagctgagctgagctgggctggggtgagctgagctgagctgggtgagctgagctgggtgagttgagctgagctgggtaagctgagctgagctgggtgagcagagctgggggtgagctgagctggatgagctgggctgaactggggtgagctggggtggggtgagctgggtgagctgagctgggctgagctgggctgagctggggtgagctgagctgggatgagctgggctgagctgggctgagctgagctgggctgggctgagctgagctgggctgagctgggctgggctgggctgggctgggctgggctgagctgggctgagctgggctgaactggggtgagctggggtggggtgagctgggtgagctgagctgggctgagctgggctgagctggggtgagctgggtgagctgagctgggctgagctgggctgagctgggctgagctgagctgggctgggctaagctgagctggactgagctgggctgagctgggctgagctgagctgggctgggctgggctgggctgagctgggctgagctgggctgagctgagctgggatgggctgggatgagctgaactgggtgagctgagctggggtgagatgagctgaacagggctgaactggggtgagctgagctgggatgagctggggtgagctgagctgggtgagatgagctgggtgagctgagctgagctgggctgagctgggtgagctgagctgggtgagatgagctggggtgagctgagctggggtgagctgagctgggtgagctgggctgagctgggctgggtgagctgagctgggttgagctgagctgggctgagctgggctgagctgggctgagctgggctgagctgggctgagctgagctgagctgggatgagcagggctgggatgagctgggctgagctgagctgggatgagctgggtgagctgagctggggtgagatgagctggggtgagctgagctggggtgagctgagctgggatgagctaggtgagctgagttggggtgagctgagctggggtgagctgggctgggtgaactaaactagggtgagctgggctgagctgatctggttgagctgggctgggtgagctgagctgggtgaactgagctggggtgagctgaactgagctgggtgagctggggtgagctgagctgagctgggtgaactgagctgagttgagttgggtgagctgagctgggtgagctgaactgagctggactgagctggggtgagctggggtgagctgggctggatgagctgagctgggtgagatgagctgaacagggctgaactggggtgagctgagctgggatgagctggggtgagctgagctgggtgagatgagttggggtgagctgaactgagctggactgagctggggtgagttgggctaggtgagctgaactggggtgagctgagctggggtgagatgagctgaacaggtctgaactgggatgagctgggatgagctggggtgagctggggtgagctgagttgggtgagctgagctgggtgagctgagctggggtgagctgagctgggattagctggctgagctgggatgagctgggtgagctgagttggggtgagctgagctggggtgagctgggctgggtgaactaaactagggtgagctgggctgagctgatctggttgagctgagctggggtgagctgggctgagctgggctgggtgagctgagctgggtgaactgagctggggtgagctgaactgagctgggtgagctggggtgagctggggtgagctgagctgagctgggtgaactgagctgagttgagttgggtgagctgagctgggtgagctgaactgagctggactgagctggggtgagctggggtgagctgggctgggtgagctgagctgggtgagctgagctgggctgagctggggtgagctgagctgagctgggctgggtgagctgagctgggtgagctgagctggggtgagctgagctgagctgggtgagctgggctgagctgagctgagctggggtgagctggggtgagctgggctgggtgagatgagctgtgctgggctgggtgagctgagctgggtgaactgagctgagctgagttgggtgagctgagctgggtgagctgagctgggctgagctggggtgagctgagctgagctggggtgagctggggtgagctgggctgggtgagctgagctgggtgagatgagctgtgctgggctgggtgagctgagctgggtgaactgagctgagctgagttgggtgagctgagttgagtgagctgagttgggtgagctgagctggggtgagctgaactgagctggactgagctggggtgagctgagctggctgagctgagctgggtgagctgagctgagctgagctgagctgagctgagctgggctgagctgggctgggtgagctgggctgagctgggctgggtgagctgggctgagctgggctgggtgagctaagctgggtgagctgggatgggtgagctggcctgagctgggtgagctgagctgaaaggatctgggttggagtcagctttgcttgggtgagctgagcagggtttagctgagctaggatgagttgagttggctgggctgagctgggatgaagtaggctaaataagctagcttgagctaaatagagctggggtgagctgtacttaaatgagctgtgattgaagtgggctgggatgagctcagctgaactgggctagctgatgtggatgatggtgaggctgagttaggatgagcatgactgagctggtttggacatgaatgagctggacccggctgacttgggctggttgagctttgcaagatgatgtggactaaactgggctagctggcaggatgagagaggttgaactaggctcagatgagctaggctgagcagggcttaggtgaggtggtttgggatgagctgggataagttgggctcagatgagctaccatgaactgggctgaggtggcctgggagaacatgaatcgagttgcactgagtacagccaggatgaactgggataaactgggctaaactgggttgggctaagaatggactgcctgagttatgctaagctgagctgggatgaattggggattgtcaagacttaaatgagccagactgaactggttggacttgggtgagctgaggggacctgctgcagggccggcatagctgagttgaatttagatgaggaagggtgagctagactgagcaaggctagactgcttatgctgagctacactaacctggcctgagttgggccaggctttgttggccatgtctaaactgagttaagatcaacagggagtctagaggggtaggggatgaactaagatgaattacactagctgagctgaattgagataaggtatggtaacctgagctgaactggaaagagatgtactggataaccttaactgggctgagatgagctaggtctacccaggcctggatcagcttaattagggtaggctagaccaaactgtagcagtatgtattagcctgtgccaagctgggctacattaaactaaactggacttagctaggctcagattagtttcgctactctagatggggtaagttgggccaaactgggatgaactaatttaactagcctgagatgggcagatctgaagtgtagcaaacacagccagggtgaactgaatgagtttgaccaggcctggaccagttaggctaaggaccttgtcctgggcagaccgtgtgctatggtggagtttcatgatgatgccataagagttcccccaccataacccacgtttctcctaccccatatacctgtctggtgtgtaaacctaatctttgtgtgctgatacagaagcctgagcccatcccccttccaccaccacctacctattgctttggaatgagcaaggttatctcagcgaatgtctcaaagggaagccgggacctaggcctgtccctgagagcagatgttcatgcccctggagtggctgccggtggctgaagggccagaaccacctactctagaggcatctctcgctgtctgtgaagtcttccaaagacattcctgtggttagaaggcagccctgctgtggctctgtcccatagaccaaacttacctactatctagtcctgccaaccttaagagcagcaacatggagacagcagagtgtagagagatctcctgactggcaggaggcaagaagatggattcttactcgtccatttctcttttatccctctctggtcctcagagagtcagtcctccccaactgtcttccccctcgtctcctgcgagagccccctgtctgatgagaatttggtggccatgggctgcctggcccgggacttcctgcccagctccatttccttctcctggaactaccagaacaacactgaagtcatgcagggtgtcagaaccttcccaacactgaggacaggggacaaatacacagctacctcgcaggtgttactgtccgccaaaaatgtccttgaaggttcagatgaatacttggtatgcaaaatccaccatggcaacaaaaacaaagatctgcatgtgccgattccaggtaagaaccaacccttcccgaggggatggggagagggggcaggcccaggcatggcccagagggagcagtggagtgggtcttaagccagcctgagctcacacctcaacctttcattccagctgtcgttgagatgaaccccaatgtgagtgtgttcattccaccacgtgatgccttctctggccctgcaccccgcaagtccagactcatctgcgaggccaccaacttcagtcccaaacagatcacagtatcctggctacaggatgggaagcctgtgaaatctggcttcaccacagagccagtgactgtcgaggccaaaggatccagaccccaaacctacaaggtcataagcacactgaccatcactgaaagcgactggctgaacctgaatgtgttcacctgccgcgtggatcacaggggtctcaccttctggaagaacgtgtcctccacatgcgctgccagtgagtagcctgtgctaagcccaatgcctagccctcccacattagagcagtcctcctacggttgtggccaatgccacccagacatggtcatttgcttcttgagccttggcttccaacagtggccaaggccaaggatgagcagtaggcagcagggggatgagagtcagatggagggaatcagcatcttcccttaagcagatttggaagatggagactgagcttttatccaacttcacaactagacacatcacaacctaacacagtgttctcttgactgcaggtccatctacagacatcctagccttccccatccccccctcctttgctgacatcttcctcaccaagtctgctaagctgtcctgtctggtcacaaacctggcaacctatgacaccctgaatatctcctggtcttccaaaagtggtgaaccactggagaccaacactaaaatcatggaaagtcaccccaatggcaccttcagtgctgtgggtgtggctagtgtttgtatggaagactgggataacaggaaggaatttgtatgcactgtgactcacagggacctgccttcaccacagaaaaaattcatctcaaaacccaatggtaggtatccccctttccttcccctccaattccagagcataccctgtacctcacagggagggcaggtccccttctaccctatcctcactattatctttgcttacagaggtggccaaacatccacctgctgtgtacctgctgccgccagcccgtgaacaactgatcctgagggagtcggccacagtcacctgcctggtgaagggtttctctcctgcagacatctttgtacagtggcttcagagagggcaacccttgtcctcagacaagtatgtgaccagtgccccaatgccagagcctggggctccaggcctgtacttcacccacagcatcctgactgtgacagaggaggaatggaactccggagagacctacacctgtgttgtaggccacgaggccctgccacacatggtgaccgagaggaccgtggacaagtccactggtaaacccacactgtacaatgtatcgctgatcatgtctgacacaggtggcacctgctattgaccatgctagcgctcaaccaggcaggccctgggggtcgagttgctctgtgtatgcaaactaaccatgtcagagtgagatgttgcattttataaaaattagaaataaaaaaaaatccattcaaatgtcactggttttgattgtccgatgctcatgcctgctggggcaactgttgtgttatgcttgtcctgcacacaccctgtatacttgcctccaccttggcccttcctctaccttgccagttacatccttgtgtgtgaactcagaaaggcttacaacagagtgtgagcatgccattcctccagctacttctagatatggctgaaagcttgcctaccttggtgcaggcagcattcaggcacatccacagacacacagagacagacatgcatttatacatagatctagagatggacatgtatagatacatgcacgaatatgtattcatagacacacagatagaggttccgcatgcgtgcatggacaaatacaaacaccttcagagacaaatatgcacagacacacaaccacacatggaaacaggcacaaacacacatgatcatgtgtgcaccaaaacagaatataggcaaatatagacaagtgaactacatagacatgaagacatgcatacacagacatgtaaagaaacatcttgaaatgtgtacactaacatgtggacagacatggcacacagttacacctggtctctgaccaggaccataatctccagggttcagggctcagagagtccatactaggctgggtggcactgatactcctcagggtcccactctatgattaggggaaatagcccgaggagcaaaatgtgcatttttggctcaacaccatggggcagaagataccccactaaccacccatgacagaaaattagccttggttgtgtctccattaatagaatacctcaggagatcaatgagagagcgcttgacccactcacttcccagtccagatgcagaagacacaatgcaattgtccaaaagaattgtacacacacacacacacacacacacacacacacacacacaccaacaaaggaacctctataaggagtcaccacccaataacattgcctctttggattcacatcctggacattcttcatattcatatccatttgggacctgggctttagaaatccccaagggctcatctttacagaggtcagagatcccaataaatgccctggtcccacagcctctctatctcttggtaccaagactcaacactgctggcaggggtagaacaatcaacacacaggaactctgatcaaagagaggcatgagatgcctgggtccttcaggaagtaaggagggataacctctgatatgcctactcttattcccaaagcccaggagaagggaaacctgctctgaattctcagtctaacagccccgatggtgccacctgctcagagaaagtccaaagaacacaaaaatcattatgccacatttcctgagtctgcctttacccatgtccgtatgttgcatctgccttgcttgctctgctgccccagagttcctgggacaaggccccaagttagtgcctcctccagtttgacctgtgctttgtctctgtctagcttgagctattaggggggccagtcaattctccagaaccagcagaacacccccaaccctgaggcaaatgttcaatcaccccaaggcttggcttgaccctccctctgtgtgtcccttcacagagggggaggtgaatgctgaggaggaaggctttgagaacctatggaccaccgcctctaccttcatcgtcctcttcctcttgagcctcttctacagcaccactgtcaccctgttcaaggtagtgtgtgtggtggggctgaggacacagggcagagacagggagtcaccactcctcactgcccctacctctactctgtaaaagggaacagcaattcacactgtctctgtcacctgcaggtgaaatgactctcagcatggaaggacatcagagagcaagagaccctcccacagggacactacctctgggcctggggttcctgcctgtatgactagtaaacttattcccacatctttcctgtgttgccctccagctttgatctctgagacgggcttctttctagactggccaaagactttgtccacttgtgcaacctggaacaatgtctggaaccacagacagctgtgctgtatacaaatgtcactttgaaataaatacttcaccttgcgaacccactctattgtgaaggaatttgttcttgttttcaaacttttcctgtggtgttgacatcccaaagactctctaaatagagcctgggaacttgaagtgaacagtctgatggggcttaagagtgaaagagggaaaggaggtgtggaagaagagagagagagagagagagagagagagagagagagagagagagagagagaaaccaccctgacagcaaagtatagcacaggcagccaatgggtagcagtctggtttatccaccctgatagaagaaagtagggcagagaaaactccaggcctgatctcacaaaagcaaccgaatctgaaaagtagcctctagcctggggtgtctgctccatccctcagcccaccctcttgggctggcgttgcttccagctagtgcaatactttggtgttagccaaacctttgtggtatgtggggtgtgccttgggagagttggctgagatctctaggatgtttgtatcccttctgcaacatgacaagccctaggggttagcccataacttgaggactcaaaccctctgtctataacaactgctgtggtcactggagaaggacagctaaaggcctgctcacacagcaggaaaggaaagggaggtaggtcatgtacttcagctcagaggaggaagcacagcagatacaaggtgagggcagtgctaggggttctgctgttcaccgtgtggatggctggaggaacctcacagaggtgggactagctggttacattgagagcaggacctgggagcagggcataagaaagaatatcagacagtgggagggaactgtgtagatgccagggtcctaaagagagtctttaaataagcatgtatggtagcaccttggtgatggcccctttctgagttgggtttctagtgggtagctgcaggagagcaacaagcatctattgagaaaacactgtaaagacgatagggcccaccaccaaattccagatatattttaggcattcacctcaataccctactttccataccagcatctgttttagtttccctgggctgcgggtgcaaagtgccacatgtggcagtttgagcaacagaactctgttctttcccagttctaaaggccaggattctgggcttcagcaggctggttcctctgtgcggcagggagaatgtgtcacagacttccagctctgaagccatagcatttgactaatacttgtctcctggcaccaacaccccagttactgtttcaaatgcatagcccatccccatgtgtgtttcctttgtacttactgccacgtttcacgaacccagttctgctgggtttgatgcccaccctcattcagcacaagttcatctcaggcagattccacccactacgacctcagagctagaagtctatgacacgttctccctgctgcacagaggacactagcctgctgtagcccagactcctggcctctagaactgtgaaagaacagagttctgttactcaaactgccacgtgttgcactttgccccagcagcccaagagagctacatagatgttagtatatgacgtaaggtgcagaggtgactttggaattgggcgatgaacctccaggcagtaaacagcctgctgacctttgcattagctgtgtgactgagatcacatcagttcccgacccccaagccccttcagacgtcacatcaatagagtcaaccgttagagtccatcgctataggaatgatgtcgcttgcactttagaaaggttttataaccaggactgtagttgtaccttaagctttgtgatatgtaaagaagtgagctaattatcaaaaggaaacattctgccaagtgatgttgtacttgaatgtgcccaaaacaaacatcccagcatcaaacgctagtatcttaaaccaacacaggtactgagtcatattaaactgaacgtacttcttgattcacacagacctacactgctgtctctgtttgcggagacccatgcagactaggtactggtgcacatagtcaacgagatgctgagggaggagagcacatactttaaggtagattaaaagggcactggacttggctattgacctccaggccacgctcaatgatgaggcaactaagagtctctgtacagccagaaatgtccccatatgctggccaggtataagatagatggtactagacacttggtgcaagagaaagagagtgtatatgacagacataggcacttgtagacttagtacacagcccactcagggccctaactgtctaaaaatgtgaaggagaatccataactcagtccatgagcattacatacacacctgtagctccacccacctcatcttcacaccttttaacatacagatcatcaggttatatcaggcctgtggcactctgaacccatctccatggctagtctatatccagaatgctgatggaccagcggtcaaggaagcctctctacctaccactctgatgccttttcctcctgagcttcatggtcaaagagaggatccatgagagcatccagggaccaaccacagccctatcagcacatggttctccagccatgtcgtcaactctgtctacccttggttattgctctttaataggtaccttgtctcactgtggcttataggttccatacgtgactatgatatgatagttcttcatctcaggtcctctgagtatcaacattctcacagacctagagcctgcctttgctctgaaagctgtatcttctcaacttggcactgacacagacagcaccctccattcctgtgtattgacccacatcctacccggagatattcctcaagaagcctcctccttaacctatgttcttccccggccagcacaagctcctaaatctgtgtcctgggtctgagccttggacctcataacgtggatcttctgtttacagaggttcaccccagcatcctacactacaattacccagcatgggcacctctgaccagacataaccttcctgattaacaatctgcttcttgttctccacattgcagtctttctgatgaggcccacataacctacaggctcctcacctctttctctgacacttcacaacacattcttccttcccttccattacatactgtcagtgtctctaaacccagagaaacacctggcttttcctagcagtcccaatcattcaagttaaggaccctcactttagtgaggatggccagtcccatgacccttcagaatttgttcccatctacatagttctgaggccctgaaggtcaccctctcccaatatctgtacctaactcctcctgcaaagacctgcaatgagctcctctactctgggggatccactaacctgtgtatcatgtgccagagcaggtttgattacttcattccgtattctcatgagcccctgagaccagaactggaatccctgattccacaatctaaaccatcaggttcccatggcagtccattttagagaccttctggtccgtgcctcttcttaatttatccaaggcattctcctgagtctcagcaatgcttctgtctgaagacataatttcctctacttggacactcaggcagagactcgagcctcttctttaaccgattcagtttggatggcacaccaggcttatcagtgttttcttgagatagcactagctagagacagggacagagaggtttagccaccaaagctggacttagatcacacatgaacaagaggcccagaggctatgaaccctctccaatgagctggtcaggaaagagtgggcataatcactcagcctcagccagctcagggacccagaaggcccaggtgcacagagtaggagcacatccaggcttcctaccttgtcccctgagtctcaagagtaccacatcaactactcccacacatccacatgaactaatctcagtcagctttggactccccctcatgtccagatacagaaacctccccagaataaaggggaacctcaggaaataccttatgccacccactgtcaatcatgttcttactcaatcatagggtggaaatagggtggcattcgcatctctggaacaaaggctgtgactctgggaaagacaagagaaagccaggaacaaatacatctgctttcacagcttccacatgtcaaaggggtcagcactaaatgaagctgcagaagaagaagacctcacagacagccagcatctgtagcccttccagatctttgagtcatcctatcacaggagattgagaaggagttgacggaccagcccaagcagaggaagcctgtgtgttcaacagtaaatgtgtttgccagcagcctgatgtcaactgagaagactgtggcgagtgcttgggagacaatcacgggcagctagagctgcacaaccccatagacaacaagcctgaaacacaaggagatgatgaaatatatccagaagactgcggaatcagtttggcctggaccacaggttgatagaaccaaggcagctgagccctgtggtaagtgaccaggagggcagagggagggagcttccaggagcatgcctgggaatgccttcaggccttctgagaagcagaaagtaggcaccctggggttccaggaaccatcccagcactcaagagttactaagggaatagaagcaaacctgagctgaaggagagaaagaaaagtggagggaagcccaagccactcaaagtaacaggcaggacaacttccagtgagctgagagaacaggagtgctggagaaggcagagcaagcccagcagatcaggagaacctgcataggagtctggatgactagagaaacccagaaggtgagagaacaggcttaacagctgtcatggacttagggatatgcaagcctggggcaccaagctgatctgcatagagggcaagggtaagtgggaatccaagagatctaagaatgaccagcgctgggcagagaggtggcctgggagaagatggctggtcttccccatgagtccaatagcaagattgtcggaataggttatcctatgacagatggcagtatcagtgaccaaatgaagacgctatggaagaattggaccatgtgggagttaagagttgaggacacaaggctgacctgcccatgggaactacagctgataaaagtgctgtgattcagggcatttctggaagctctgtgatccaggttgcagtacacaagtaaactgggacagacgggagttctgggggttcagttcagatactaggaacttaggaaactgggaaaagggaagttggggctgatggcagaactatgagaaggcactggaattctgaagaccagaccttctaatcaactatagaggaaatggagtgggtaggagtggtggatacagctgagcatcacaggggacctggggattggggacagctatactggggctagcagtgcaaacacagaaattgggggaccaaagggggaattgaggatgaccttgggtagatagaaatgctggatgcctaaggtacctccaggagcttagggaacctcgcagagcagctacaaagctggtggtgttagtgacactttcagaaccagatcgggcaggttggcatgtagaaatggggttaatggagacccaggacagtggcagattcagaataaaatacaaacaaccgaaagagttatgtgccctgtaagaagttgatctgacacccacagcagagacatctaaggtctcacagcccacatcaaacaggcttctgatctaaggacagcacaaaaggaaggaggcatcaaaccatcctggggaagacagtgcagtagtagccagaagtgtaagcccaacagcagtgggactggtgtagcagccagggacagggtccctgccaagatgagcctcaggggagctgagcagctgagaaactcaccagctgagaagctcaggggaatcagggtaagtggaggttccagagaatcaggggaagtcaagagctcagaacccaagaaggggcacctgcaaaagagctaaggcctatgagagtgtggggaacactttaagcagctttaggggagccaagacaggtagaagtgtggggacccaaacagggaagctccaggggagctaggaaaggtggaactgtgggaatccaggcagagcagcacctggggagcaaggaaagaagtgtggggatccaggcagagcaggtccaggggagccaaaaagtggaggtgtggagacacaagcagggcagcatctggggaaccaggacaggtggaagggtagggacccaggcagagcagcaccaggggagccaggacaggtggaactgtggggatccaggcagagtagcaccaggggaccaaggaaagaataagtgtggggatctaggcagaacaggtccagaggagtcaaaaagtagaagtgtggagagccaagcagggcagcatctggggagccaggacaggtggaagtgtggggatccaaccagagcagcaccaggggagccaggaaaggtggtagtgtagggtcacaggcagagtcgaaccagggaaccaaagaaagaagaagtggggggaccaggggagccaggacaggtagaagggtggggacccagacagagcagctccaggggagccaggacaggtggaagggtagggatccaggcagagcagcaccagggaagccaggacaggtggaagggtagggacccagacagagcagctccaggggagccaggacaggtggaagggtaggggcccaggcagagcagcaccagggaacgcgggacaggtagaagggtggaaacccaaacagggcagcaccaggggagcaaggaaaggttgtactgtggagatctaggcagagtaataccagggaagccaagacaggtagaagtgtggggacccagacagagcagctccaggggagccaggacaggtggaagtgtggggacaaaaatggggcggcttcagtgtgtctggggagcaaggaaaggtagaagtggagagacccaggcagagcaataccaggggctaacaaggtagaagtgtggggaccagaacagagcagcaccaggggagccaggacaggtggggatgtggggacccaggcagggcagctccaggggagccaggacaggtggaagggtagggagccagacagagcagctccaggggagccaggacaggtggaagggtggggaccaaggcagagcagctccaggggagccaggacaggtggaagtgtagggacccaggcagagcagcaccaggaaagccaggacaggtggaagggtagggatccaggcagagcagcaccaggggagccaggacaggtggaagggtagggacccagacagagcagctccaggggagccaggacaggtggaagggtaggggcccaggcagagcagcaccagggaacgcgggacaggtagaagggtggaaacccaaacagggcagcaccaggggagcaaggaaaggttgtactgtggagatctaggcagagtaatgccagggaagccaagacaggtagaagtgtggggacccagacagagcagctccaggggagctaggacaggtggaagtgtggggacaaaaatggggcggcttcagtgtgtctggggagcaaggaaaggtagaagtggagagacccaggcagagcaataccaggggctaacaaggtagaagtgtggggaccagaacagagcagcaccaggggagccaggacaggtggggatgtggggacccaggcagggcagctccaggggagccaggacaggtggaagggtagggagccagacagagcagctccaggggagccaggacaggtggaggtgtggggacccaggcagggcaccaccaatggccaacaaggtagaagtgtggggacccaggcagagcagctccatgggagccaggacaggtggaggtgtggggaccaaggcagagcagctccaggggaggcaggacaggtggaagggtggggacccaggcagagcagctccaggggagccaggacaggtggaagtgtggggacccaggcagagcagctccaggggagccaggacaggtggaagggtggggacccagacagagcagcaccaggagtgtcaggagaggtggaagttaagtagttataggggaacaggggcagaatagaatgagggatgcaggctgagaggatacaggggaaatgtggcaagtggaagggcaggaagagaggcagagtggctacagggaagttgaggcaggtaagactgtctgttccaggtcaaaaaacactgaagaccagtagaaaggaaactggtgcatgtggtagtgggggattcttagcttagcagtcacagggaaagtgagccaagtaggaatgcaggcatggggggcaggcacagctgagcaaacactaaagagctgtagctgaagggttataaggtaccaagctgagaagctgctgggaatctggagctaatggggtgtgggggagcaggctgagcaactacacaggatcagggataggtaactgtgtaaggaggcaggctgagcatctccatgacagctggagctactatgaatgttaagctccagactgagcatctgcagggaaacagaggcaagagggagtgtggggatccaggctgagtaggtccagggaagctgtagtaggtggaggtggaggcccaggctgaggagctacaggagagatgggacactagggagggcagggatcatggccaagcagatactcagtagctgagatagatgtggggaatcagcttaagcagcagacacaggggagcaggatctagtcagcttctagggatccaggctgtgtagacatggagggactgggggagctataagtaaatacactaggcataaaattacagggaaacggaggccagtgggaacgtgggcctcctactgaacaagtaacagagagccagaactgacgggttgaagaggaaccaggctgatgagctccaggaaatctgtggggactcggtcaatgggagaacagggtgagcagctatagaggatcagggataggcaaaaacgtatggagtcaggctgagcagttacatgagagctggagccctagttatgtggaggtccaggcagaggggctggagggtagctgagggaaatggtgctagagaatcaggctaggcagacacaggggagcaggttctagtctacatatgagtggggatccaggatgtgtagagaaaggatagcaaaggtcatggaggattccaggcttaggggtcactgggaaactaagactggtggaagtgggattgtcctaagtgaacaaattccatgaagctagagccagtgggtgtaaaggtagcagactgaaggactatagagtatctgggggtggatgggaatgtggggaatcgtgctgagccactacaaggacagtgtggctagcaggctgtaggagaccaagctgagtatctgaagggaaaccaagggaagtggaagtgtaggattccagaaatgagcaaatgcagggcacttgaggcaggtatcagtgtagggaacgagactgagcagttcacaggtcacccagggtaggtaagagttctggatcatcagagaagcctctggaagccctaagcacctacagtagacctaaggcaggtggggtgcagggaataagttgtgcagctcctgaggaggaggacaggttggagtagaggaggttctgactaaagagttgaatgggagcagggcaggtgggaatgtagaggaactagctagacagaagtccagatgagattgagggccacatgatgccctgagccgatgagctggccttagaaatcactctgctgggaccagggccaggggtttgaggaacaaggctgaggtgaaatggtagcatgacagggaggcaatggcagagaggaaggagaaggcatgcttaattcatggtggagtgcagggagggaaagagccaggaggtctaggctggagctgatccagctttctgcactgatgagaggggcgggactgagttcttttggctccaggagccagggcaacaagacaaaggcgcctagcatagcaaggacacatctggatctaagaccaggagaagagggcaagaccgaaagttcaggaggtcatgggagggagtgggaaatctacaagggactgtctttagaaaagagtaagtgcccagtggagggagtgcccaagcaacaagtccagtgttgggagagatcggggtgggcaaaggctgtatgtgcagtaggcaggcccaagtccccaggaaggaaagaagaagtgcataggaaaacgggtcaggtctagcaggagccaaccgaggtgctcaggactgagaggcagagcccaagacacaggaatcgctgagctcatgcaggtaccaagaataactgagagctaagagaaaaattatctagggaatagggggacatgaggaaggactgttggctgagaagggaaagggacagggagaatcctaagggttggcatagacaaaggaaacacacaggctttgggttgttagtccggggctctgcatatgatccaccgagattgtggaaacagaagagcaggaagatcaaatctgtcccaactatacagggacacacggtcaacctacaaaaggaaggagatgtgaggatcaggggctgagcagtgaggaggtgtgtggaggtgttagagctcaggtgcagcagagactagcatggccctggggatagagggaaggacccaagggacagtagggacaggagggcgaggtgaggtgatgaccagcattatacaaatggtggcgctgtccaacttctagggccctgtgctactgagaaaggaaagggacttccgaggtttggcaatacaagccccgtgcaaaggcagaacccagggcactgtgaagacaacactgcaagacaggagaagccaaggctgagttcaccgaggtcacattagtgagaatacactgcgaggagaggggaggcgctgagcacccagccacaccagacaggcccatgctgagtccctggacagtgggggaggggagcacctggtgacctgtaagaactgtgagactggaggagaaccaaggtaaaaggtgtgtcaaaggacacatgtttagcaggctgggccgacttaatgcaggacacacgtggtggcaaagccaagagggctgcgtatgagccacaagtgaatcctgacccaagaatagagagtgctaaacctacttacatcaaagccaactgaaaggacaaggccagcaaaacgaagctaaggccagagatcttggactatgaagagttcagagaacctaggatcaggaaccattagtgaacagacaaaggcaggtaaagcagcctaggagtggacaaagacaggagaatacagaagacggcagggatgacccgacttcagtttgggcttcactgttgtccaaactgtgtgcagattatggcccatgggtaagaggtttagcattagaacacagatacccacattggacaatggtgggggaacacagatacccatactgcaaggctcttcgggccctttcctaaaagtgtactaggagtgggactgggctcaaagggattaggtgtgatctggcctggtgaggctgacactgacaagcccaatggttgggtgttgcatcctccatttatacagccagggacttggggagggtacaaaatggaggacttgtaggagcttgggtccagacctgtcagacaaaatgatcacgcatactttttcttgtagctgaaacaacagccccatctgtctatccactggctcctggaactgctctcaaaagtaactccatggtgaccctgggatgcctggtcaagggctatttccctgagccagtcaccgtgacctggaactctggagccctgtccagcggtgtgcacaccttcccagctgtcctgcagtctgggctctacactctcaccagctcagtgactgtaccctccagcacctggcccagccagaccgtcacctgcaacgtagcccacccggccagcagcaccaaggtggacaagaaaattggtgagagaacaaccaggggacgaggggctcactagaggtgaggataaggcattagactgcctacaccaaccagggtgggcagacatcaccagggagggggcctcagcccgggagaccaaacattctcctttgtctcccttctggagatttctatgtcctttacacccatttattaatattctgggtaagatgcccttgcatcatgacatacagaggcagactagagtatcaacctgcaaaaggtcatacccaggaacaacctgccatgatcccacaccagaaccaacctggtgccttctaacctatagacaccaataacacacagccttctctctgcagtgcccagaaactgtggaggtgattgcaagccttgtatatgtacaggtaagttactaggccttaaattccagccccaggtccaacaaatgtcctctgaggcccatgttggaggatattggcatatttccacctttcttcttcatctacaggctcagaagtatcatctgtcttcatcttccccccaaagcccaaagatgtgctcaccatcactctgactcctaaggtcacgtgtgttgtggtagacattagccaggacgatcccgaggtccatttcagctggtttgtagatgacgtggaagtccacacagctcagactcgaccaccagaggagcagttcaacagcactttccgctcagtcagtgaactccccatcctgcaccaggactggctcaatggcaggacgttcagatgcaaggtcaccagtgcagctttcccatcccccatcgagaaaaccatctccaaacccgaaggtgggagctgcagggtgtgtggtgtagaagctgcagtaggccatagacagagcttgacttaactagacttctgccctcttactgacctccatgctgaccactctctgtatccacaggcagaacacaagttccgcatgtatacaccatgtcacctaccaaggaagagatgacccagaatgaagtcagtatcacctgcatggtaaaaggcttctatcccccagacatttatgtggagtggcagatgaacgggcagccacaggaaaactacaagaacactccacctacgatggacacagatgggagttacttcctctacagcaagctcaatgtgaagaaggaaaaatggcagcagggaaacacgttcacgtgttctgtgctgcatgaaggcctgcacaaccaccatactgagaagagtctctcccactctccgggtaaatgaccccagagtcagtggcccctcttggcctaaaggatgccaaaacctacctctaccacctttctctgtgtaaataaagcacccagctctgccttgggaccctgcaaaaatgtcctggttctttctgagatacagagtccagcgaggtcatgggctgaggggcgtccagggtttgaggcctgaggtttgactaaggaaaaagggtgatctacactgccagacacagcacttttgatttgctggcatgaacagaatttacctctcactgaaaagtggaggctttatcccgaggcaatccctcttgctttctcttcctctacctaatacatctatagtgggcacagaatatatcatgaaagtaaggacgacccaaactccacctccctagtccacctttacccctcttcctagccaaggatcccactgaaggcactcaatggacacatatggtcacagacagacccttgctattccaccactcaatgcaagaagcgttccagagactaagtctaatgtaacgatgcacatagctgtcactgctctctcactgcccatgagaatcaacatggacccattagacacaacctgatgagcaacactgagggcaaaaggcccatatgtatgcatgcacacacatcttcaaatgcacagcacagtgacacacacacacacacacacacacacacacacacacacacacactggaacctcacatgggcatcctgtgcagtactcccagatgaaaagaaaccaggtctacacacaggatcatcccaacattcacaagtgggccagctgagacagatacaacttttctctgccttggatgcccacagacatcttcatgcacacatgagtttcctggggtcaatctgtccctgaccctgggatggtgccccaacctcacacagttggcacccatccgaaactgtataacttactcacttcccactgtggatcttaactgcagtcctagcatcatggggaatcagctctgcaatccctctggccctcagttctcggtcatcagcagatacaggatcaggcagaccacacagacactacccatgagaggcacaggccctgactcagcctagccaggttcagaactcaaggctggagcacacacagaatgacctagtgtataggccaggccaccatcaggtccagggtgtctggtgagctcagggacaaaactacagcactttggggaactgaagtttctggtccagagagagatcagaaaggagagatggcctcagggagggtctgctggcccagtcaggctgtaactttctcctggaactccacacaacctcatctgacacagggaatggccctagtcacgccgtgttgggataaacaaacgctgacttccctctctgtccagggatggaagtggacgatgcctgtgctgaggcccaggacggggagctggacgggctctggacaaccatcaccatcttcatcagcctcttcctgctcagcgtgtgctacagtgcagctgtcacactcttcaaggtcagccacaccatctccacagtgtccacaccatcctcacactgttcctcatactgtctctgtgatcagctatgccccacactgtcccatgctattgacctgtcttacatgctgggcaatgccacctaaccttctctatgatacagtctcacagtgtcccatgcagtctccctaattccccaagatgtccgcactctattgctgtgttgcctcatgctgcccccacactgtccatccctccctggtatgctatcccaggctgttgtctctattttcatgctctcctcacactgtccctagtgtctcatactgccaatgttggctcccacattgtccccacactctgcacacaaccggacaataaaccctgctgtcccataatgttccctgtggtccccaactctatccctgcacatttgtctatgttccctgaattctcatgttgtttgcacactgttagtgtctaacgaactctctcccaggtgtaccttcttccatgctgtctcacctcatctcccattctgtccttgtactaaccccactctatcacgacactgtccctattcactgtccctatgaagtgcccatgctgtctgcattctgtcccatgttgtatcctcatcccggtctcatgcagttcagatctatctgacactattcccactctatgcacacatttccccctataccatccctgtctgatcaacatgcaatcctctagacacccatgtagcaggttagagactctagggatgggtacctgcctgactgagctacctctcttggtgggagaggaaacacaggtgagagtgcagtcctgatcttatcttattcaccctgtcccacaggtaaagtggatcttctcctcagtggtagggttgaagcagacgctggttcctgaatacaagaacatgattggacaagggccctaagccacctcctataatggcaaaggattccccacgccctagaggaccctgtccaatgtgccaagcagtctgactcagatcacactgtctgctcacttcactatcttctgtctatgagacccaacctccctcaattcttctctctctggaggactatgtggacattagatttccacaagccacagcctccaggacctaaaataccatcacagcagcagccaggacactagatagggtcagaaggaccatagtttcctgactagtttatccaatctgttgggacagaagaatcactgaaaaagtgacaagtgcccaagttgcctgtgttcagcttggaagggaccaaccttggaaccagtcctgtcagcatcatcttctaaaacacaagaattgagtatgtaaatggcagattttggatccccagggtaagacagacttcaaccaggccacgacctgggcaatcatggcccagctgaagttgactgaattattccagtggccttcacatcgtcttgccaggttccttcttaccacttccatgaaccctgggatacagaaaagaactgtgcttctcgggatcttgggacagaactgtctaattggtgggatccttaggtagatctttcttccagtcacgggtataatacaatacactagattctcacataaaggaaaaaattcacacacaactccggccagtcctgaggcctagacaccaccacctctctggaattctgagctctatgctggaggcacaagagaggaaggcctggacttcatggcctctgtgtagccctagtaggtgcagaggcccctaagccggggttgggtgaccagcaaggacctcctggagagggatctgatgagtagattccacctgggacagaaggaaaaagatgaaaagcaacagaggtggaagggcactggagagagccatggtatagcaggtttatcttgcagacctgacatctgtccatgactctgagacttagctaatgacagctggggcagcagtccaaggaattaccatgccccctaacaccaggctcctggagtgtggagtgggtctactccagagctccaatacctgtttctccatcacttctcagccaatgagaaatcggtttccagacaggaagaaaaatgaaggcaggaaggaaaagtgggcacctgttcttctgtgagtggcaggaagttctcaaaagactcaggactttggcttctaacttcctgtggatcattgatgtctctaaggtctctgtctgctttgttggttttgtttgtttttggtttggtttttttttttttttttttggtcaataaaacgttttttcaaacattccacaatctctgtgttcttcctatgtgaaccagccctggtacttagaaacagcactgttaagtagaccagtgagtcatgaagaacatactacctctcctggtcctgtgtcctaccagttctcctctaagggtcccttcacagctgtgtgccagctctgctatcctataccagataggtcctccgtctttcttccctatgggcagtttcttcccagccagaagctgcctttgtcctgtaggttgcccactcatggcctcccacaccagccacacaaactaagaagcaggtgtctcagtgacctcaggctcagtgataacatttctatggaaaagtgaaggaataagaaagagaagaaatactccagagtcagggaagagaaagattataagggatgtttgctttctcaagtatgtttggagaagttccagatcaggcgttgacaaggtcgggttctcagcagggctcttcttgcctggtaggtgccttctcctccttgtgacctcacaggctttccctctgtgtgtgtctctgtcttgatctcttctcataagtacacagtcaggctagaagaggtacaccctagccctaattataacttatcagtttatgaccctgtctgcaaacataggtcatggtggcttaaatgtcatttgctgaatcttctggggacagaatttagtccacatcagctctccctatggaccccaaaagttcatatccttcccacatataatgtccctcaccccatacaaacaccccaaagtctcacccttccaccatcagctctgtctcaattctcctccaagactgctagttaggtaagtgtgagatgtgggtgtgactcattcaggatcaagttcaagccatgactgtcaggaaagaggtttaggccgtcagcgcagagcagattccaggaccatctgagcagttgctgaggttcaaaggcagattatagactgattccttgctatagagaagatagcccattgtgatcctctcatactagttcagtgataacaattctatggaaagtgaaataataagaaagagaagaaatactcgagtcagggaagaaaaagaacctgcaggggctgccaattgtctcttgttctgctgggcgtgtctgtgccctactagagttggattctgtcttcccatggagacaaggagacaccggctccatggcctgagatagcaccgtagaggggcccagaatttgcttctggaatgtaggagtgttagcaccaatggagagctaaggtacacaaaggcctcctaagcaaagacccaaaaacaggagctaggtgctaagtgtgcagttgagttctcagatggtgtttagatgtcctcaggtatatccttgactgttagagactgttcaagccattatgacctctagtgatggctatatgagggaaatcaactgggctggactggtcaagagaagatcctgtcaccacagctacagtggtgaggggctgggtggggggcagaatccaaactggccaatgccattacagtttctggtatagggaaagacatgcttttcctcggacagagaagcagcagatccctgtgagtggtattgctgctggggaagccatagggagatggacctcggagggatttgttgctcatgtgcagacagctgcaaggagcctgggctttggccaagcacactgggcagccgctacaatgctacacactttgggagttaggacagtggaacctagactacaaagaggacagctgcactaaccctgagaaaagttacttaattcttcacaaacctctgtttaatgtgtgaccaaacatccctccctgcaaagcgagggaagaagaacatagaatagtgaatttaaagaacatttaggcctgggacagtttccttgctcagataagaggaaatgtttgttttatctcatagttcaagtgtacagtctgtcacagcaagagtcttagtttcatttctgttgcaatgataaagtaccctgaaaatagcaactttattcagcctgctgtttaaggttacagtctatcaccgtgaaaagtgagagcaggaacttgaggcagccagtcattcacacaatcaggaacagagagaggggtgtgcacgtgcccactacccagtgacacgtgacgttagaaaggaaatttggtggggataaaagaggaaatggaggagagggagtagggacggattttatatattacatgtattatgaaattccctaacaataaagagagctacaaacggctcattaggagaaggtacaatgtgtgaagctcttcagtgggttatgaagtagggatggtgaagcccaggtgcactgaaaatgaatttaccccagaagccgcccttcatatgtgcaccatgacatgtgcacgcacacacatgtacacaattatacatagacacattcaacataaacacaacatacatgtacatacaccacaacaccacacacacacacacacacacacacacacgaaacacatacataaacacacacaatcattcatggacacactcaacataaatacaacacaccacatgccctcatacataccacacatacacacacacatgcacacacacacacacaaaacacatcaatacatgcaccaccacacacataccacacacacaccttcatatacaccactcagcacacacagagacacaaaaaaaatacatatttacacaccacacacacatacataaacacacacaatcatgcatggacacactcaacataaatacaacacaccacatacactcatacataccacacacacacacacacacatacaaaacacataaatacatgcaccaccacacacacataccccccaacacacacacacacacacacacacacacacacactagaacacactaatataataatgtttaaggactgcatcatttttctatctttctgcaggcacttgtctgaggtgctgaatgttttcatgctcccatccttgccaaacagcactttatgaggagttataaccatgccacagcctcagtgtggtgctgacttaaaagttcctccaccaaataaactattccattccttccgaaaatagccagatactttcccagaatgtaatacaggtcatcaggtcttgatgagatcttgtctccccaccctgaaacctcatgagctggatccttgctgtccttaccccctttttaatgttccctgcactgggctttctcgtcccacagcatccatgtaagttatcctgaaagatgccacatcctttcctctgctgacaaatctgtccaccttactgtttaagttcctagagtaggtatattctgagaaagtacttatttatatccagagaatatatacatttcacatagttccttttgttctggttattgatgtcattgggtcctgaagttgtgtttggaccttacaatgacaaaaacccatctttccctttcttttaccaccaattctatctcatctatctccctgtttctctctgtccatatctctgtctttttctctgtgtgtgtgtttctgtgtgtgtgtttgtgtttctctctctctctctctctctctctctctctctctctctctctctctctgtgtgtgtgtgtgtgagagagagagagggggggggggagacatgtgtgtaggtgcgagtgaaggtcagaaaaggcatctgatccctgaaacgagaattacaggaggttgagaaccacctgaccagttacagagaaccaaaatcagggtcctgtacaagagcaatatgctctcttaactgccccgacatctctccagcaccccagctttcttctgaggtcttgtatgtcatacataatgaactcagatagggcacacccagtgtagctcagcgtagccagtacagccacagctagagatttgaagaactgggccatccttccagctgggcactgtggcctggtttctgctcaattagagcttcaatcctcaagatgaaggaatcgagtctgctgggccatggagcaggcctgagtgcttgctctctgtgggcaagcatgtgtcctgtttgttaccacagctagaaacagatgcttctgctgagaagctgcctgcgaggaggctgttgatgcagagtcgtgaagcgtggcgaccgcggcaacccacatgacaaggctgacttacagactgtggcttcagtgctggggcaaacaacaaccaagaggtcctacagacactccagagccacaaggtcaccacatgtctggagcagatggatttcagtcaacacttctaccacccaagaagcttttgtggtgctgggtatagatgaactcaagtagcaaggttcgggctgtgcttgggaatcccggcaacagaagggtttgctggagtggtaccacaagcattgctgtagtgcaatttccatcttctatgtggagaaaagcccaagtacagactgtcaggacaaaaccaggcagcttccatccccaaaactgcccatgagtctccagccttggtaccctatggcctccgaaaccgcccaggggtgtgtgtatgtggtctctaatgaaaaacatcaagccaaaaatccagaaaggaatctgggcacaacctcccagtggccacaatccttccaggaagattttcttcagtaggctgaggtaaacagtcttacggaaagtgccatccagtatctccagtggtctggaagaccctgagaaacacttgctgaccaacatggtcatttgtctactcattactgcaggcgtttgttttttaagtgtgcatccgcctgcgcgtgcccgtgagcctgagcgtacgcgtgtgcgtgcgtgaggtgcggtgcggtgcggtgcggtgcgtgcatgcgttgcttgcgtgcgtgtgggcgggcgtgcaggcgtgcgtgcatgtgagagagagaacacatgccgcaggacacaaagaaaccagaggacttgcaaaagtcagttctctcaacaggtcagtcctagatacggatcttcggcagccttacccgctgagccaccacactggcccattctttcagtcatttctccatccatctggctctcctgaggtgagaaaccttggccctccaatccttgcagtcagcattggaagcagattgacagtgatgggcacataggagagggagcagtgccagatgacagggcaccgggagacattgcccatatcttacaaagggtgaagatccaaggactggtttgggagccttaggggatcagccagggcctctggtgtagcagagacccagcactcctggtcaactgtacctacagaggtttaatcatttctctttggtaggctgctatgaccaatggatgctttgaaaggtctgtactgacctgtggggctcacgcagaactgggcctagcaggtggggtttgaagtttggcagcctccgtgggaaggatgtgaggaggtagacaatgctctggagagactggagccctgaaaggggggcactggatgtttgctgctcagattgggggtgatggccactcctgggtcacaaagaaaggcagggacttctcatgggatcactcaggaaagagatctggagaacctggaaagagagattatcaggaaagtactccaaagccctctgggagcttttgctgagtctctaggttggtaccctaaagcttgccagggccacaaacctctcttggtgggattaagctgctgcaagggtcccagattttttttctttcacatttgagttgttacttatgggtggcacataaaattactcttgttttcccatcaacgtcgtagggtaggaacccaagatcggagaactgatttcttccatatagtcccaaattcacacccaagtgacttgcttcctctcttagctcctcccccaccatcaccacctcccagtaacactgtcatgctctggatccatcaccaagggcttgacccgatggttagttcagagcactcacgatctcacagtctctggaaagtcctgcatagacagaagtcccatcacttaatccactcgaggggacaagcaaatgaaccgtctcatcggaggatgaagaatcttactaccgggtcccgacatcagcttccatcctgctgccttgtcccaggaatgtcagacttaacacccacgtttccaacccaactgcatggctagtcccttaaaactcttcattccctccccagtctctctgcatctgtgtccatatctgtctaaagaaccatccttccgcaattggagctgtggccataaattttgcgtgtgtcatttatcggttgtttatgtcaaccatctcccttctctgttcctgttgtctgcctatcacctccatcctcatcaccctctgtccctatcatatatatatatatgtatatatatgtaaatatatatatacagttgatatgcaggaaatatatattcagtttatatgcaggatatatatatgcagttgatattgatatgcaagatatatatacagttgataggtaggatatatatgtgtatatgtatatattgtatatatatacagttaatatgcagaatatatatacagtttatatgcagaatatatatgcagattttaagtggactagcaagccccgagccctcaagaaccgctaggatccctgcccagtcatgttactgtcattggaagtcatcttctgtttccactccaccaccacagaaaagatccacttcatctgttgggcagggtggttgaggagaaccaagaccagggccctttaattctgtggaggaaccaaagacagctcctgctacataggagcctgtccggtggtatggggaccagggagaagttagaggtgtggaatacagggatagaatggtgtacaacgagggatcatggtgtaagggagggtactgtgaggacagtgtgtgaacagagtgtagacagtgagaagaacttggaggacagcatccgcagcatgggagagcaaaggaaggtgtgacgacattatgaagatattgtgggaactgcacgtgagtgtgaaagacagcatggggtagcaagggaggagctgtgggacactaagtgtataggagggaagtagcatgagacgctctagagcagttgttctcgaccttcccagagctgtatcctttaatacagttctcatgttgcggtgacccccagccataaaattatttcattgctactttgtaactgtaagtttgctaccgctatggagtatattggaaatacttgttggtatgcaggatatctgatattcagagtggctacccatggcataagaaccactgtgctaagtgggtagaagggccaccatggaaatagcatggggacactagaaagacagcatgatgagagtattgtgatagcattgggatggtgtggggtcttgtgaggatagggtggggacagaagagtagacagcataggtcgtcacagggacagtataggaacagtgtgaggacagtgtggacactgtggagatgttgtggctgaccttgaagagtgtgacagctgcactgtagtacacactgagcaggaagaggctgatgtagatgatgatggccgtccagaccccgtccagctccctgtcctgggagtcagcacaggtcttgtccagttccagccctggacaaagagggtagtcagtctctgtcccaacaaggctgggacaattccctctatggcaggtgcatcagcaatgaggtacccactggactgggccagtagattgtttctggggccagccttctgccctctccagaccagcagactacactctcccaactgctccaacccaagtcccggactcagccagacacaagatggcaatctggactgtgtaagaacccttcccacctgctccactcctcagatttggggctgtctgggctgaatcagagcctgtgaccactgaccctctgcctatgaccaagcccagaaagccagtgtaatggtggaccccaggcctagtgatgcctggccttcagagttccacactgggaagtgaattgggccactcagctatgtgggaaggggactgtcatctctatgggatgaaagcatgggtctgaaggtccagaagcagaatggcatgagagagtgtgtattgtgggacaagttgcctttggaatcctttggcagtgctatctgtctcagctgagccagatgtgaggaagagcctcagagaaggcctggtgccttgatgggtctgagttctgtactgggagctcctatgaggtctcggagtgtaaggcttgtgtctgtgctcatgcacaccagtgtacaagtctgtgtaaatgtcatgtgggttgaccgatggtcatcagactgctaggcactggagtcatctgatggctctgaattctgcattctgtgtcttcaagataagagacataggtatctagcccagaaaactagtctcaaggaggagagagggtcatggcaaaggtagacagacagaaattccagtgctttgacctgagatcctctccctgggcacaactgttcatcctggttgatctagagaagaaaatgacataagcctgacctccaatgggccatacctctgctgagcatcctctcatcagttttcctgtccatcttggtactgctgaccagatgggtcacacacaggtaatagcctggctcgtccagaagctgccaggcatgatcactgagctcctgaaggaagacagcttgaactataagacagatgtcgagtttcacataccagtgaacaaagctccagacttccaagacatgattgctggctcagggaagtagcccttgaccaaacaacccatgttgccatgggaaccaggaaagagatggacagggccatggctcttgctgcaaaggggggaagagatgtgaacatactgtccagcctggagaagtctttttctccatgcagccctgggtcttctaagatgggatctgctcctactcttcacgaacctagccagtttctgttttctctgaccccagcccctactcttagtctcaggaccttgcttttcacccccatccttacactgtaccccagccctgccagcatcgaatctggtcccaatgggttctttccttccaatctatagggttaactcccctgagcattcccactctcccctgttcctgtgaggccccaggatcagaattgtggaccacaaccccagaaataaaacccatggaatcccagcccccagagaccctccctgtgcacggcctccctcagtttagcaaagagttacttctggacccctgcctagcttctctctgcagccatatgacccactgcttataaacacagccagaagcgccagttccctttctcctctccacctggcttcactctgcactctgtactctcactccagacttcactttcctcctggagccacagacacttctgggctctagagagattgcatcagctggagagggaatggcagaggctgccaagtaggctggttagaggtcagacctgagagaaggtcttctccaaaaaggtggtcaggagaatggacataatcactcagccccaagcaatccaggaacactgggtgacagctagtctctacatcttcttctaagggtctcaagaggaccacttcacctacccctacaggaggtaacccagaccatgtctggactccccctggtctccccctaccccaaacactgaaaccaacagaagaaagaggaacctcaggaagtgtcccgtgtcacccagtttcgatcctgttcttagtctgtactgggttgggagaagtgtgatgttcacacctctggggcaaggactgtgaatcctggaaggatgagacagatctcagagctgggctgttagcagcccagcaccaatgcaaaaagagcagcagtcacaaggttccacacgtgaatgtagtcagcagagaagctggagaaagccacagcctagggagagcagtgagcttttccagacctaatagacggcagaacacaggaggatgaggagttgacagatcagccccaacagaggggcctgtctgttgcaaagaaaaggtgcctacctgcaacctggtgccaaccaggcagacaccagactttccacggacagaagccaagaccactaaagccgtgcccacctacagacaaccagagtaagcctcaaggagttaatgggatagacccggaaacctgagggtctagccaggcctagaggccggtggacccaggacagctgaaccaacagagaaaagaaaacccagtggagcaagggcagaggcatacagaattgagagagttggtaaagaggggatggggaacgttcacctgggaggactgatacacctattagaaagagctagagtcagagtggatgcccttgtgactcccggcattggatagcagatcccaagaacaaagctgaaagaaggtaaatttctcaagagaaagtcttccagaggaactatgggtaccaggcaataagtagtacatccgtaggagggaaccagacagtagtacatctgtaggaggggaccaggcagtacagctgcaggtagggaccaggcagtatatctgtaggagaggaccaggcagtatatctgtaggaggggaccaggcagtagtatacctgtaggaggggaccaggcagtatatctgtaggagaggaccaggcagtagtatatctgtaggagaggaccaggcagtatatctgtaggagaggaccaggcagtagtatatctgtaggaggggacaaggcagtacagctgcaggtaagctaaggacagtaagagtagtagagagccatgatgactccaaaagctcagaagacctggcagagcagctacagggaatccggggctggtggagttgggaggaccaagccaaagagctataggtaagccgaggctggtgaaggcacaaaaacaagctaaggagctacagagggggcaagggctgtggcaggtgtggctaagagaggtccagggcacccccaggaaccagaaagagctttacaggagttctagaggaggaaggagttggggagacaggctgggcatctgtaaagataaggtagcagttgtcacagtttgggtctcagagctgcccaggggattaggggaaaattctgagaagctgtgggagagtaggggatggtaggaatgtggaggaccagtcctagcagctgtggggaagctggggatggtaggaatgtgggggatcagtcctagcagttttggggggagctggggatggtaggaatgtgggggaccagacctagcaattttggggggagctggggatggtaggaatgttggggaccagtcctagcagctatgggaaagctggggatggtaggaatgtgggggaccagtcctagcagctatggggggagctgggatggtaggaatgtgggggaccagacctagcagtttttgagagctgggaatggtagcaatgtggggtccagtcctagcagctatggagtagctgtagatggtaggaatgtgggggaccagtcctagcagctgtggggaagctggggatggtaggaatgtgggggacaagacctagcagctatgggtgagctgtagatggtagaaatgtgggggaccagtcctagcagctgtggggaagctggggaatggtagaaatgtgtgggattgttcctagcagctatgggggagctggggatggtaggaatgtggaggaccagtcccagcagctatgtggggggctgtggatggtaggagtatgggggaccagtcctagcagctatgggagagctggggatggtaggaatgtgggggaccagtcctagcagctatgggagagctggggatggtaggaatgtgggggaccagtcctagcagctatgggagagctggggatggtaggaatgtgggggaccagtcctagcagctatgggagagctggggatggtaggaatgtgggggaccagtcctagcagctatgggagagctggggatggtaggaatgtggaggaccagtcctcacagctgtggggaagctggggatggtaggaatgtggaggatcagtcctagcagctatgggtgagctggggatggtaggaatgtgggggaccagtcctagcagctatgggagagctagggatggtaggaatgtggaggaccagtcctagcagctatgggagagctggggatggtaggaatgtgagggaccagtcctagcagctatgggagagctgggaatggtaggaatgtgggggaccagtcctagcagctatgggagagctggggatggtaggaatgtgggaggcctgtcctagcagctatgggagagttgaggatagtaggaatgtgggggaccagacctagcagctatgggagagctggggatggtagtagtatgggggaccagtcctagcagctatgggagagctgggaatggtaggagtgtggaggaccagtcctctcagctgtggggaagctggggatggtaggaatgtggggggcctgttctagcagctatgggagagctgggaatggtaggaatgtgggggaccagtcctagcagctatgggagagctggggatggtaggaatgtggaggaccagtcctctcagctgtggggaagctggggatggtaggaatgtgggaggcctgtcctagcagctatgggagagttgaggatagtaggaatgtgggggaccagacctagcagctgtgggggagctgggaatggtaggaatgtgggggaccagtcctagcagctatgggagagctgggaatggtaggaatgtgggggaccagtcctagcagctatgggagagctggggatggtaggaatgtgggggaccagtcctcccagctgtggggaagctggggatggtaggaatgtggaggaccagtcctctcagctgtggggaagctggggatggtaggaatgtgggaggcctgtcctagcagctatgggagagttgaggatagtaggaatgtgggggaccagacctagcagctgtgggggagctgggaatggtaggaatgtgggggaccagtcctagcagctatgggagagctgggaatggtaggaatgtgggggaccagtcctagcagctatgggagagctggggatggtaggaatgtgggggaccagtcctcacagctgtggggaagctggggatggtaggaatgtggaggaccagtcctagcagctatgggtgagctggggatggtaggaatgtgggggaccagtcctagcagctatgggagagctagggatggtaggaatgtgggggaccagtcctaggagctatgggagagctggggatggtaggaatgtgggggaccagtcctagcagctatgggagagctggtaatggtaggaatgtgggggaccagtcctagcagctatgggagagctggggatgataggaatgtgggggacctgtcctagcagctatgggagagctggggatggtaggaatgtgggggaccagtcctagcagctatgggagagctggggatggtgggaatgtgggggaccagtcctagcagctgtgggggagctggggatgataggaatatgggggacctgtcctagcagctatgggagagctggggatggtaggaatgtggaagaccagtcctcacagctgtggggaagctggggatggtaggaatgtggaggatcagtcctagcagctatgggtgagctggggatggtaggaatgtgggggaccagtcctagcagctatgggagagctagggatggtaggaatgtggaggaccagtcctagcagctatgggagagctggggatggtgggaatgtgggggaccagtcctagcagctgtgggggagctggggatgataggaatatgggggacctgtcctagcagctatgggagagctggggatggtaggaatgtggaggaccagtcctcacagctgtggggaagctggggatggtaggaatgtggaggatcagtcctagcagctatgggtgagctggggatggtaggaatgtgggggaccagtcctagcagctatgggagagctagggatggtaggaatgtggaggaccagtcctagcagctatgggagagctggggatggtaggaatgtgagggaccagtcctagcagctatgggagagctgggaatggtaggaatgtgggggaccagtcctagcagctatgggagagctggggatggtaggaatgtgggaggcctgtcctagcagctatgggagagttgaggatagtaggaatgtgggggaccagacctagcagctatgggagagctggggatggtagtagtatgggggaccagtcctagcagctatgggagagctgggaatggtaggaacgtggaggaccagtcctaggagctatgggagagctggggatggtaggaatgtgggggaccagtcctagcagctatgggagagctggtaatggtaggaatgtgggggaccagtcctagcagctatgggagagctggggatggtgggaatgtgggggaccagtcctagcagctgtgggggagctggggatgataggaatgtgggggacctgtcctagcagctaagggagagctggggatggtgggaatgtgggggaccagtcctcgcagctgtggggagctggggcaggtgggaatgtgagaaaacaatccttgagctatggaggagctggggatggcaaggatgaaaaggggcaaatcctagcagctagagggaagctggggcaggtgagggcgggtgtaaggaaccagacctagaaactatgggggaagtggagcaggtaaaaatgtgataaaccagttatgcagtccagaggctggtaggagtgtaagggagcagacatagtggctatggggaactgggatatatgggagtgtaagggaccagattcagtagctatggtggaacttgggagtgtagatgagcacgctgaaaagctatggtgcaactgcaacaggttgtcagggtgtaaagaaccagacccagcagccatgggaaacctggggaaagtagcgatgtgggggaccagatttggcacctataagggagctggggcatgtggacatatgaggggccagaagcagcagttatagggaaactttgaaatataggcaagtgtaccaagaagccgtagtggagctgaaacagatcctaggtcctatggaggagctgaagaaggtgggagtgtgagggaccaggccgagcatctgtggaagggctgaggcagggctctgggtcggatgggagtggcaccccagagaagccctagaagctctggcgatggagctgagcagttacagtggacttggggctggtgggatcgtaggagaccatgtagctgcagaagagctggagaaaacaggagtatgaaagacccagccaagtagccactgaagagctggggtgttattggggtgtgtggggacacagtcccagcaggtttatagaggttggagccttggcagtatgtgcagtaccaaacccagcagcttggttcaggggcttgagtagaggcaggctaatggggtccacggtaaccctaggcacttaggggactggattgcgaatcttcaggggagctggaacaggcaaagttaaaaggaatcaagcacctggaagaaagcaaggaaagataggattgatggggatccaagaaactcccaggaagtaaccccagcagggacatctgggagctcagttcagacactgaatcaaaagcacagaggaaggagaggtggtaggtttccaagctatcctgtccaggccaatggagcagccaggaaggagggaaggagaccaacaggaatggggcagctgtagccagcagggtgtgagagacagggatgaggctaggtggctagcaagaagggcaacttagtgggagaggggtgaattaaccaccctgacctcatgctgacaggggctgagcaacagacaaaagaataagaaagccaagagctcatggctggaactattctggctgtctgctctgactgtgttgaaggggctaagcacctgttagctaatgaggctaaaacagttaaatgagcaaagtagagcaaaaagctcccacagcggagagcatgggagaacgggagactgtgagatcctcggggggtctaggagtttatctcagagtgaagaacagtgaaaagctctgcttgggagttctttggggaatggcgatcatcctgggaactcccttatagacctcatggcatggaggagagcaggagctcaggcagacagagtagctgtgtgtgagctggataagaaagaaaagagacaacagggagagaagagaaaagggatgggaaaggactcagggctctactgaattcaggcagaagagcttggcttcaggatgctgggggccaaggaaggtgtctgattgagcaggaacatagtcaggaaaagaccctggtgctcacattcccagacaaatcttacaggttaaagttctagtatcagaacccctcgctcagatcctaggggcttatgggaacataaggcaggaagtgaaacctcttaggacagcacgaagtagcctgtgttggcccacagaagaagagcaaggtaactctcagagtttgagcaggggattgaggaaggtagtgtacaggagaggcagaaagaccagaaaggtccccagagtaagaatgaatcaagaatttatgtgtggtttggttcgatgaaggcaaaggcagggaagatagatgagaaactgatcctctttcacaaccaagaactcattgttcagtgtgagttttgatatatagaaggggggggaatgtgctattaaaagtaaaaaagaatgaaccagattcaaaagggaaaggggactaaatgtcttcctgaataatgcagcatacattcctatttcaagagctaccggcaagagaaagggacacttctgggatgtgcccagtaacattagcactgtcagagagaacccagggcagtgcgaagggtgaggtgggggaggaaggtgtctgcactcatcagcgtctcatcagggggcactgagctgtgtagaacaagagtggccagctaggtcaagacagaaaggatgcccacacacagaaggtgtagggtagagggttggtagtaatccccaggaagcagggagcaaggtccaaggagagctaaagtcacggatagagacctagggcacagatttaggagccagagtttgtgtaatgttagtagattcagtaggggcttctgaagggcctcatcactgaaagatcaaggctcctagggctggagagttggctcagtggttgctgctcttccagaggacccaagtccagttcccaacaaccacatggcatcttacaactatctgtaagaaactccagtttctcgagattcaataccctcttctaacagcacaggcatcaggcacacacatagtacacatagtcatacatctaaaataaaatacctaaaaaaaaattaaggtcagagtgcagggtctagaagtggaagctgctgacaccacttaccccagagcaacttgagaagacacagtctttttagagcaaagctaaggccagagcctctccaaatatctgaggccacgcatgttggaaaagctcacactccctcctctcttgcagcccaaacaacagccccatctgtctatccactggctcctggatgtggtgatacaaccagctccacggtgactctgggatgcctggtcaagggctatttccctgagccagtcaccgtgacctggaactctggagccctgtccagcgatgtgcacacctttccagctgtcctgcagtctgggctctacactctcaccagctcagtgacctccagcacctggcccagccagaccgtcacctgcaacgtagcccacccggccagcagcaccaaggtggacaagaaagttggtgagaggacaaccaggggacgaggggctcactagacgtgaggataaggcattagattgcctacaccaaccagggtgggcagacatcaccagggagggggcctcagcccgggagacactgtctctgcctccctcctggaggcctcctggaggcctctgcctatggccacccaccccctaagacatgatcctctggtatagatgtctgtgtcatgcataggatcataccagggacaaactttcctctctggtttggtgccttctctccttgaaaacccagtaacatccagtcttctctctacagagcgcagaaatggcggcattggacacaaatgccctacatgccctacatgtcacaaatgcccaggtaagtcactagacctggaccccagctccacaatgatggcaagagctgtaagcatcccagcactgcaggataagccacgtactgacccatttctatctctcctcatcagttcctgaactcttgggtggaccatctgtcttcatcttcccgccaaagcccaaggacatcctcttgatctcccagaacgccaaggtcacgtgtgtggtggtggatgtgagcgaggaggagccggacgtccagttcagctggtttgtgaacaacgtagaagtacacacagctcagacacaaccccgtgaggagcagtacaacagcaccttcagagtggtcagtgccctccccatccagcaccaggactggatgagcggcaaggagttcaaatgcaaggtcaacaacaaagccctcccaagccccatcgagaaaaccatctcaaaacccaaaggtgagagctgcaggccgactgcctggggactgggataggtataagaatgaatgcccgtgtggacggccatgacctctgtgtctgtttctatccccacagggctagtcagaaaaccacaggtatacgtcatgggtccaccgacagagcagttgactgagcaaacggtcagtttgacctgcttgacctcaggcttcctccctaacgacatcggtgtggagtggaccagcaacgggcatatagaaaagaactacaagaacaccgagccagtgatggactctgacggttctttcttcatgtacagcaagctcaatgtggaaaggagcaggtgggatagcagagcgcccttcgtctgctccgtggtccacgagggtctgcacaatcaccacgtggagaagagcatctcccggcctccgggtaaatgagcacggcacccagaaagctctcaggtcctaagggacactgacacccatctccacccttcccttgtgtaaataaagcacccagcactgccctgggaccctgcaaaactgtcctggttctttccggggtatagagcctaggtcacgggctttaaggtctggctggggtttaaggccagagttgtcttcaggaagagagtgaggtttccacactgccagactcagagctcatgagtcatcagggcctggagtgttggggcttagctttaggaagtgcctattccttgacttcaaactaaccagcagctgccagacggagagatacacctaggaaacctccaagggaagaaacacacaaactccaccaccctctgcctgttcctatccccatgtcccactcctctgcctatgggtttctctgagtctattgcacacatggccatgggcgtgccagagacccttgctatccctacactcaactaaacccaggcagcttttcatgggctaggtctgcacacccatacagactgcccactcatgcctgtgccacgtgagactgaggcagatggctcttgccgcccaaagggagggtctgttagccacatgcatactgaatcctgacccattcaaatcagcctgccgaacatcatccagtccgtatagcacatgtatccacgtgcacatgtgcacacacatttaacacaccaggactccgcctgtgtgccctgcacagcacctacacccagcagtgtatcaggatacccacaaccaccacttgagtgcccacgtttctgccatcacaaccagacacacctttccccttctaaggtcactgcattctaggctcagcacaagtcctctgaagccagatccgtctctggtacctcagggtcacgcttcaaccccacatgaattatacaacccagagccataatggtctgagtcacttcacactctggaattttctcaagttcaggcaagaccaggcacaggctccgctggtgattgagggacaggtaaagggtcagaccagctgtatagccactgtccactggggtcacaggccctgctgacccttcaccttctcctgtactgcaaacagagagggcccttgcacaatccaggccgccatgaggtccactgtgtctggcaaaccccaaggccttatccaactcagccggagggaacttagactgatgtcccagagggaaaagaaaggaaagtagggagtagaaagtctcccagggagactctgctggcccagcccaaatggagctttctcctctgccacatggggaattgctcccagccccccactttattgggacaaattctgactgccctctctgtccagggctagaagtggatgatgattgtgctgaggctcaggacggggagctggacgggctctggacgaccatcaccatcttcatcagcctcttcctgctcagtgtgtgctacagtgcctccatcacactcttcaaggtcagccacaccatcccccaccatctgctgtgatgcctgtgtcaaccctgcgatgtcctcacactcctctcctgacgtagtaggatgttcccttgctgtccccactctgccccacacaccattcccaccgttccctgagccgtcccacattgctctgtgtggctacccatggcgtccatactgtctgacattctatctctcttgctgtcctatgtgatctccatactgtcttacgaaacctccttgcatgccacactacccttcatgacgtccctgctatctaccatgctacccctctgggtgtccccatcagcctcaccatgtattctttgagctatcctcataccatctcaacctcaactcccacgatgtctccacaccggctcctagtctatgtcaccctgaccccttgccatccccagtctcctgcctgtatgaaaggaactgcaggagggacgggcctctgtcttgcccacagggctgaagggcctaagcatgggtgtgttctctgacttactcccacctccccacaggtaaagtggatcttctcctcagtggtggagctgaagcagacaatctcccctgactacagaaacatgattggtcaaggagcctaggccacttcctctgggatgagcttcctgggccccgcacaaccccatccatcctactgtgcagcctaatgtggaggccacactgccgtctgacagtgccaccctctagccctgtgactctgatccagaactctagactgtcttccttttggaggatcatgtggacaatgagctataccccagacccaaacagcacctccacagcagttgccaggaaactaactggttgggaccagaagaaccatctctaggatgtttgcctcagaggagctgggagtccacggtgcctgagtcgagctccatgggaatcagccgtgtctgaaatgggtcttcccagaaagagcaatgttttcagatccttgaaaggaaacatctgctaggaagaccatggtcgccacagccccaaagagtcacttcactctggtagcctttgaaccagttatatctggacaccttctttcccggtacttctgtgaaccctgggctgagtaaggggtttatgtttctcaaactgttgggatgagcctccccgagatgaagctccttgtgcagtcttctcttcccgaaacccactcaacatgctggactcttgggttcaggatccgatccgaagacaccattgacgacgcaacctcaagacaaggccactgtcacctccatagagactccatccacactctgcagggacaggaggactgctttgtgtaacctccgcaaagccctagcagggacaagtgcacagaccactgagtattggtgaggtgaccaggcaggaaaacctccaggagagggccctgatgagaagattcatattgggctcaaaaaatgggatggggggaggggggcgggtgggaaagaacagtgggcagggtgtgaacagatgattagaagacagtcacagtgccgcagatctgccctgcaggcctgctttccagactggaccacttacagcagaaaacaacagttacagtaagcatctaggagagtggacctggaataccagggctgctgtggccagtggagagtagccctgcatctacttctccattacctctcatggccaataagaagccagagcatccaggcagaaagaaagagtgtgcgtttctgtgactggtaggaaatgcttagagaacttggatctttaaaacagcttttttctagactgtgaatgtctttaagcactctctttcctctccattccctccctctctctttctctctctctctctctctctctctctctctctctctctctctctctctctgtgtgtgtgtgtgtgtgtgtgtgtgtgtgtgtgtgtgtgtgtgcactcacacacactgttgttttggcattttaaacaataaaacattcttttaacattttgtatctcatggtgtcccttcttaatggattagccctaacaccaaggaacagggcacagttaacagatcaattagccatgcacatccctcctgaccctgtcctcccagggttccctcagtgggtccctcatggctgggttccagccctaccagagccacaaaaagcttgggcatattcctccacacacacagcttttttccccagctggagactgctctgctgccatgggcaggctgtggagcagggctgatgcccagggtagaccctaggctagccagacaaaggtcccatgacagcagagaagcatgtgcctctcactggccttgggctgctacagagtcagcaaaggacatggatccagctacctccacagctggtgctcattgtctcaagccatgtccagagaagttccagatcaggcattgacagggtggagagctctctccttggttggtaggtgtcttctcctccatgtgacctcagagccccccccctttctgtgtgtgtgtgtgtatgtgtgtgtgtgcgcgcgcgcgcgcgcgcgtcctagcctcttctcataagtgcacagtcaggccggaagaggtgcatcctagccctaatcataacttaccagtttatgatcctgtctgcaaacataggcatagtctgaggtcctggtgatttaaatgtcaattggtgagtcttctggggcttcctacatacaatgccccttccccatgccaacatcccaaagtctcacccatccagcattcagctctatcccaagtcacctccaaaggcctgctagtcaagtaaggatcagatcgtgtggggttcgtcctgagataggattcagccatggtttccaggaggaaggggcaggagagaggcacaggggagagacgtataccgtgatgaactggacagactgataatgtgctgtccagaagaaagctgagggcaaacaggggcccctcccacttacactgaggtgacagttcctaagggagagtgagggatttgtagagagaagtggaggttccacagagttggagaagcaaaagattactagaggtagcctggtgtttgcaatgtctgttttctgttatggttgacatcaggattccatgctactctgtagatcaagggatacaggttccacatctttgtgtggcactgtggtggaggggcttgggcccagatactcccgggacatggaaaatacagacatcggcaggggaagaaatgggatgattcacaaccaaaggcctcctcatccgatgcttactgatctccgagagcaggagtcgggtgctggctgggcagttatcatctcccagtatttcccaggtggcatttagtagctgagacatcttcagattgtggccttggctgttagacactctatctgtttgggtctgtgtaggtgatggtggaggctgaatgaaggactggacaagggacaaaaggatcaggtcaacaaagctgcagcagagacaggagccaacctgaccaacaccactgtggcttccatgggacagttctgttttagccaggacagaagggaacagagctgcgtgaatggcattactcctatgggagtcacacagacaggctaatcacccagacaacaccaactggccagtgagaccagtgagatcctgcccacgcttcctcttaggtctggctctgtttctctagttgtcttccctggagcaaatgttgggaattgagcccatatcctctgcaagaccagtaaatgttaactactgaggcatttctccagccctgcctcaacctcttactggaagatggtcccaaaccaaaactgacggcatggtctcagaaagtacagattcgccacctccaaacccttctctcatgtctgtctgtctgtctgtctgtctgtatgtatgtatgtatgtatggccctgcaccatcacccaccacctcctggtgtcctgcagcaggggcttcccacagcaggacgtaccatagctcccaccccttacacctccatcagcactataaacatatagacacaagtgccataaccctggacacaccttctgaccccgcccccatctctgagaccaactgatctcaggctgtgttttactgaatgtgtccattcggtaaaagctatctgagtcctgccctcctgacctctatagtgtgacatccatggtgtgtgtcctgtgtcataacacgtaggtatgtcataccgtgtgttaccacatatgatatgtgtgtgaaacatccccacatgatgcctgtggtggacatgtatatatatatcttttatgacttctataggggacatcaattgcagaatacctgtgctagccagtagccatgactgaccagacagctactgacacttgacccacttgcattctgtcacagtctgggaatcataacatgacacaaacgccgattgtagcaccaggtcatgggcctgcatgagacttgacatgtgtacacacatgacatgtgtacacacaaaccacacgaaaaagtgtctcggaaaacacacacagacacatccacatgagcatcatagtgtggtcacagacatgtccacatgggcatcacagtgtggtatcatgtagtagccacagcatacatgacacagtcacacaagttcttacaagaacatacatgtctgccagttcccagaactcctggcctcaggctcagcactggccaccctggcccagcacacttcccatgcttcaagctttgcacacacagatccactgtattcccttcctgtgtttaccccattaccttcagcacaccacccacctctcttccatgactgcccccatcccacctagcacggcgccccactactgtgctagctttgttcactcagtgaccatgtgtgtccatcttccagtgaagcttgagctctggggacaagaacgtccctccagattcatgttcctgcagttctatccaactgttcagcatctgtgatgaagtcacaccaagtccctcaccccctaactagtcttctaatctggcatagttatgtgctgggaactaagtagatggtcaaagtaggatatgatgctggccaatggtgcagaccagtaggtccatgtgctgacccttcaactctaaagtcttccccacgcctaccatgtagccataagatctttcccccaaggcagggtacagacaccacatagaggaagaagaccaagtggatgggccccccatagcaggtatgggagagtcaggctgacatagcaagtgtgggagagtcaggctgccatagcaagtgtgggagagtcaggctgccatagcaagtgtgggagagtcaggctgacatagcaagtgtgggagagtcaggctgacatagcaagtgtgggagagtcaggctgccatagcaagtgtgggagagtcaggctgacatagcaagtgtgggagagtcaggctgacatagcaagtgtgggagagtcaggctgacatagcaagtgtgggagagtcaggctgccgggcacaaaggatatgctggacttagggaagccatcctccctgttttctgcccaagcacatatgtatcctactatcagctctctcattgttcactccatactcaagcatctgcccataggaggaagacctcagcctcaagtcaggatgtacatgagagcagccacagagtgagtccatatagttctgttcttttgccccaaaatgtcatgttccagaactacttgttcctttgacctagaccccagaaaagagaccagacactatagtagacacggaagtaagaacaacacagtgctgttgtttctctgctggcaaaggttgttgccacacttatccctggcaaagatataaaacagatgtcatcaaaatgccagtcctggttgtaaatacatatttagaaatgtctgtgtgtgtgtgtgtgtgtgtgtgtgtgtgtgtgtgtgtgtgtgtgtgtgtgtggagacaacaggtaaaaaaataaagacgatgttagagggaggaaattaaagttggaaatgatataatcatatttttattggataatttatatttacatttcaaatgttattccttttccaggtttctcgtccataagccccctgtcccatctccctcccccttcttctataagggtgttccccctctccaaccacaccccattcccgcctccctgccctgacatttccctgcattggggtgggggggatggggttccagccttggcaggaccaaggacttctcctcccattggtacccaacaaggccatcctctgctacacatgcagctggagccatgggtctgttcatatgtacactttgggtagtggtttagtccctgggagctctggttggttagtattgtttgttcttatggggttgcaaaacccttcagctccttcaatcctttctctaactcttccaacagggaccccatgctcagttcaatggtttgctgctaacatccgcctctgtatttgacacactctggctaagcctctcaggagacggctatatcaggctcctgtcaacatgcacttattagcttaatcaataatgtctagttatggtgggtgtatatatatggactggatccccaggtggggcaggctctgaatgtccattccttcagtctctactcagaaatttgtctcaatatctcctcctgtgcatatttttgttcccccttttaagaaggactgaagcatctgcaccttggtcgtcattcttcttgagcttcatgtggtctgtggattgtatcttgggtacttcaagcttctgggctaatttccacttatcaatgagtgcataccatgtgtgtgtttctgtgattgggttaccacactcaggatgatattttctacttccatccatttgcctacagatttcatgaagttattgtttttgatagctaagcattcattgtatagatgtaccacattttctgtatccattcctctgttgaagggcatctgggttctttccagcttctggctattataaataaggctgcaatgaacatagtggagcacgtgtccttgttatatgtcggggcatcttttgggtatatgcccaagagaagtatatctgggtcctcaggtagttcaatgtccaattttctgaggaacctccagactgatttccagagtgtttgtaccagcttgcaatcccaccaacaatggaggagtgttcctctttctccacatcctcgccagcatctgctgtcacctgagttttttttttttttttttagagagacatggaagaagattgtttgttggtctatatttatggcttgctcagcctgtggttttgttttttattaacttgagtatttcttatatacatttcgagtgttattccctttcccagtttccgggcaaacattcccctcccccctctccttccttatgggtgttcccctccccatcctccccccattgccgccctccccccaacagtctagttcactgggggttcaatcttagcaggacccagggcttccccttccactggtgctcttactaggatattcattgctacctatgaggtcagagtccagggtcagtccatgtatagtctttaggtagtggcttagtccctggaagctctggttgcttgacattgttgtacttttggggtctcgagccccttcaagctcttccagttctttctctgattccttcaacgggggtcctattctcagttcagtggtttgctgctggcattcgcctctgtatttgctctattctggctgtgtctctcaggagcgatctacatccagctcctgtcggcctgcacttctttgcttcatccatcttgtctaattggatggctgtatatgtatgggccatatgtggggcaggctctgaatgggtgttccttctgtgtctgttttaatctttgcctctctcttccctgccaagggtattcttgttccccttttaaagaaggagtgaagcattcacattttgatcatccgtcttgagtttcatttgttctaggcatctagggtaattcaagcatttgggctaatagccacttatcaatgagtgcataccatgtgtgcttttctgtgattgggttacctcactcagtcacctgagtttttgatcttagctattctgactggtgtgaggtggaatctctgggttgttttgatttgcatttccctgatgactaaggatgttgagcatttctttgggtacttctgagccattcgatattcctcagctgagaattctttgattacctttgtaccccattttaataggattatttgactctctggagtctaatttcttcagttctttgtatatattggaaattagccctctatcagatgtatgattgataaaaaatcttttccgatctgttggttgccattttgtcctaatgacagtgtcctttgtcttacagaagctttgcagttttatgaggtcccatttgtcgattcttgatcttacaacataagccattggtgttttgttcaggaaattttccccagttcccatgtgttcgagggttcttcccactttttcttctattagtttgaatatatatgattgcatgtggaggtccttgatccacttggacttaagctttgtacatggtgataaaaatggatcaatttgcattcttctacatgctgacctccagttaaaccagcgccatttgttgaaaatgctaatttttgtccattgaatgattttagatcctttgtcaaagatcaagtgaccatacttgtgtgggttcatttctgggtactcaattctattccattgatcttcctgcctatctctgtacgaatatcacacagtttttatcactattgctctgtagtactgcttgaggtcatggatggtgattcccccagaagttcttttatggttgaggatagttttcgccatcctggattttttgttattccaaatgaatttgcaaattgctctttctaactctatgaaaaattgagttggaattttgatggggattccattgaatctgtagattgctttaggcaaaatggccatttttactatattaatccagcctatccatgagcatgggtgatctttccatcttctgagatcttcctcaatttctttcttcagaaactcgaagttcttatcatacagatctttcacttgcttggttaaagtcacaccaaggtattttatggtatatgtgactattgtgtcataatttctttctcagtcttttatccttggagtagaggaaggttactgattggtttgagttaattttatacccagccactttgctgaagttgtttgtcaggttaagtagtctcttgtggaacttttcgggtcacttaactatatactatcttatcacctgcaaatagaggtattttgacttcttcctttccaatttgtatctatttgacctccttttgttgtctgatttctctgggtaggactttgaatgctatattgaataagtaggaaaagagtaggcagccttgtctagttcaattttagtgggattattcaagtttctctcgatttagtttaatgttggctactggcttgctgtatattacttttacattttatattactttttttatgtttaggtataggctttgaattattgatctgtccatgacttttatcatgaaggggtgttgaattttgacaaatgctttctctgcatctaatgaaatgatcatgtggtttctatctttgagtttgtttatatagtggatcacgttgatggttttctgtatattaaaccatccctgcaaccctgggatgaagcctacttgatcatgatggatgattgttttgatgtattcttagatttggtttgtgagaattttattgagtatttttacgtccatattcgtaagggaagttggtctgaagttctctttctttgtcgagtcttgatgtggattaggtataagcataattgtggcttaatacaaggaattgggtagtgctccttctgtttctattttctggaatagtttgggcatagtttagtatgaggtcttctataaaggtctgatagaattctgaactaaacccatcctctcctgggcttttttttttttttagttggagacttttaataactgctcctatttctttagaagttatggtactgtttagatggtttatctgaccctgatttaactttggtacctggtatccatctagaaaattgtacatttcctccagattttccagttttgttgaacttaagtttttgtaatagaatctgatgatttttttaatttcctcggattctgttatttctcccttttcagttctgactttgttaatttggatacgttatctgtgccctctgattagtctggctgaggatttatctatcttgttgcttttctcaaagaagcagctcctggttctttgtatagtcctttttgttactacctggttgatttcagccctgagtttgaagggctcttcaaactcctctactcctcttgggtgtatttgcttctttttgttctagagcttttaggtgtgctgtcaacctactaatgtatgctctcccctgtttctttttggaggcactcagagctatgagttttcctcttagcactgctttcatttgtgttccataagtttgggtatgttgggccttcattttcactaaattctaaaaagtctttaatttctttctttatttcttccttgaccaagttatcattgagtagagcgttgttcaacttccatgtatatgtgggctttctgttgtttttgttgttattgaagaccagccttagtccatggtgatctgataggatgcatgggattactgcaatcttcttgtatctgttgaggcctgttttgtgacagattatatggtcaattttggagaagctaccatgaggtgctgagaagaaggtatattcttttgttttaggataaaatgttctataaatatctgttaaatccatttggttcataacttgttagtttctctatgtctctgtttggtttctgtttccattatctgtccattgatgagagtgggatgttgaaatctcctactattattgtgtgaggcgcaatgtgtgctttgggttttagtaaggcttcttttatgaatgtaagtacctttgcatttggagcatagatattcaggattgagagttcatcttggtggatttttcctttgatggatgtgaagtgtcctttcttatcttttttgatcacttttggttgaaagtcgattttattcaatattagaatggttactccagcttgcttcttcagaccatttgaggtagtgtctgtctttgtctctgaggtgtgttttctgtatgcagcaaaatgctgggtcctctttacatgtccagtctgttactctatgtctttttattgggaaattgagttcattgatgttaagagatattaaggaatagtgattgttctttcctgtttatatttgttagaggtagaattgtatttgtggggctttcttcttttgggtttgttgcaagaagattactttcttgctttttctagggcataatttcctttattgtgttggagttttccatgtattatcctttttaggactgtgtttgtggaaagatattgtgtaaatttggttttctcacggaatatcttggtttctctatctatgttaattgagagttttgctggatatagtagcctggcctggcatttgtgttctcttagggtctgtatgatatctgcccaggatcttctggcttttcatagtctctggtaagaagtctgctataattatgataggtcttcctttgtatgttacttgaccttttttccttactgcttttaatattctttctttgttttgtgcatttggtgttttgacttttatgtgatggaaggaatttcttttctagttcaatctatttggagttctgtaggcttcttatatgtttatgggcatctctttctttaggttagggaaattttcttctataatttttgttgaagatatttactggccctttaagttgagagtcctcactctcttctatacctattatccttaggcttgatcttctcattgtgtcctagatttcctggatgttttaggttaggaactttctgcattttacattatctttgatggttgttttctatggtatcttctgccctgagattctctcttctatttattgtattctgttggggattctttgcatctatgactcctgatctcttccctaggttttctatctccagggttgtctccctttgtgatttctttattgtttctgtttccgtttttagatcctggatggttttgttcaattccttcacctgtttgattgtgttttcctgtaattctttaaggggtttttgtattttctctttacaggcttctacttgtgtttcctctttaagggcttctacttgtttatctatgttgtcctgtatttctttaaggaagttacttatgtccttcttaaagtcctctatcaccatcatgagatgtgatttttaaatccaaatcttgcttttcctgtgtgtttggatccagtatttgctttggtgtgagaactgggctctaatgatgccaagtgtccttagtttctctttcttaggtgctgcgcttgcctcttgccatcaggttgtctctggtgttagattgtcttgctgtctctgacactggcttgaccctcctgtaagcctgtgtgtcagcactcctgtagacctgttttctttcagctggatctgggaacagagagctgctcctgggtttgtgtgtcctgaggccaccaggcaggtcgcttggagcagaagtgttggtcttacctctgctctcaggtgtgtcagcacttctggcaactggctttcagctctggacacaggcagaaaccagaagatttctgcccctgactgctcctagcttcctatgtccagagggcacagagggcactaggtgggttcctcttggtccatgaatgtcagcagaagtagttgtctcctctgagctctcaggactgtccacacttttgagagtccatctctctcccccacaggatttgggaacagagagctgtgggagcggttcagctccgggtgcaggtagaaaccaaaagtatcctgtactagacttctactgcctttattgatataaccatattttaatcccaaaagcaaaaataaatgctttatttctggtcttgagctaagggtatagttcaattgttagagtacttgtctgtaatgcaggagccctggatctgatctccattacagaataaaccaaatgtggtaatgcatgcctgcaatcccaaatcccaaatctccaaaggcgtacacaggaggatgagactttcgaagtcattcttgtctacatagcaaattagagaccaaccttatctttaaaaatagtaataatcctgatcttccacttgaagtaaatgtatccagtaactgtacctgataccattctatgttagattttgtttcagggtttcgaagataagttctccagagaagcacaagtagtgggagatggcggagagagggctggtagatgaacccataaacaacaaacaacagagctggaggacaattaggatgatatgtagttagaaacagagggacagcatataagagacaacagggagataacacataagagacaacacagggataacacacaaaagacagaagagagataatacataagagacaacagagggacagcgcataagagacaacagggagataacacgtaagagacaacagagggataacacataaagacttagagttttatggttcgccttgactagattaaggaatgaatgcctgtggaggtgtctatgaaggactttccagaagtgttaggtcttagggggctctgacttagccctttggtggagtgagaatgtggtggcattatagaaaaatgctgaacagtaagaagtccaggtggaggaagcagattactgggggtgtgcatgggccattacatctgaccctggacactacattccctttatctctacttcccatcagtcaagaaataaatagcctcttccacacaaccccactgtcattatggccctaagcacataagccccccaccctttaagtttctttgaggtatctggtcatcctggctcccagctccaagtcacccaaagggttcatataggcaagcatttccacctctaccgtgttccatcacaaaccactggctatttgagaaatttcagacagctaaagaatggttctcttagcactgatggccttgcattcaagagacttgcctgctggtttgcaaacctagaggctatggcactgaacttggacacccggtggcgtgctgcttttggcatagagaaagctgacatccagcagctaagtgactgctcctgagctttggaactcgttctcctgtatcaccctctacatccaactcttctcagcttgtcttctcaatatttccactgtccctcatcaccttagattcttgtagacgctgccctcaatggcttactggctcctcaactacttcctgccactgtcgccctcagggctggaaacctggagccttgtctgctcttggcacagccacacagcttactctacccatgacaaataaggagacttggagaccatttggggaaagcctttatcagggcctaatgggtgcacacttggatcaggagtcatccattggagagaagcctcaaggaatagtggggaacatactgtatctagagacagtatagggtcatgatggcgtggattatactccccacaaagacagccctgcatgtgctctgcttccagtctcaccaatcacaaccctcccgtatgaacccatcacagcccttgcacagattgcaggtctcaaatatgttcacctttctttctgacataaccaggattttttttaatttgcttgcgtgtttattatttctatttattttattcattttttatttattattttacatcccactcactacccctctccccatcatcccctcccaagatccttcccccatcccctctccctttcacctctgagccagtggtgccccctccgtgtatctcccaaccctaataatcaggtggtttgagccaccagggaagatgctcttcttcctttctgaccttgagagctgctattccaaggtcctctggagctgtgtgtgtgaagtcacctggaggtcataggtggagtggagttttaaggccatggtagaggctggagccatagtagttggaacaaggctgtggtttcagcagcagccatgattgttgtatactttgcagctcaaatatggtctcctcagggctctgtgaggtattcaaagcacctagaatcccatgatgacacttccaccagtctctaaaagagacctaagactactagatatagaaaaaggccaacttaagtacatcaaaaggtcaagccttctggcccctaatggctcattttacatgaagaaaaggtgaccattacactatgcccaataaagacatgttacatttacactacggtccttggcatcccttagcagatgatcctagggagagctgagcaatctcgtccatctcacctccacccagtcaccaaaataacactgttctaaggcacacttctgagacttacagagctactagagagttgggggtagcagtaagacctttccctggccctcaagatacgttcacacccacatcacatatatgagttcgcatacactaacacacacagcacatcttggacatggcccattcaggaacagatctgtcatgatcgcttgagttaaggaaccactcaagggaatgactaaaggaggatcccactggagtcctggcccacaggaggaggtggaataaaggttaggtagggcaagacaagggcactaaagccactatgctgctggggccactgtggacactgatggccagaaatggaatgatcagcctgtaggcaggaggggggagggaggatgattcctgaaaaccagaagagtcaccgtggagtctgaaccaggaaggagagagagctcccagtgtaaccctaaggcttaagtagttgcaactgcctcctctccttccagaggaccacccactgccacctagcatagcactctgaggactcagaaccagcagcccagcataagctgagtgtcaaagaagaatcaggcccaagcaggctggacacaaagtttcttggtcctcaggctatgagggagatggagtccttcccactattcggggcacaccacagacagcagcacctgatccagttggagcaaaggctcctcacccctgtgttttccctcagaaccacaagtctttccaggaaactctgtatttacccctcagattcccacccaggtctgttaggctaaaggccaagcctgtcacctcagactatctgaaagagataaaaccaggcaagacccccaattccctcagatctcacaccccgtgttcccaaagtccctaactaactttcctggggccagcccggggcctacctggttcttccactgtcagttagctctctgatgtcttccaaatacaattaaacacccttctgtgggaagtcagacttggcaaagcctaagtcccccagtcccttgcatcccannnnnnnnnnnnnnnnnnnnnnnnnnnnnnnnnnnnnnnnnnnnnnnnnnnnnnnnnnnnnnnnnnnnnnnnnnnnnnnnnnnnnnnnnnnnnnnnnnnnnnnnnnnnnnnnnnnnnnnnnnnnnnnnnngggaagctgctgggcccacacaccatctttaccctctccccttccctcagtgcagacgtagaccacaggcctggaagagacgttagctgtttctatggtgttccatgagacccagttactccccagatgtgctctgtccttgccagagtagcaagtagaggaccccaagccgaagggcggccacttgtgagtgattaccagggaagcccactgtctctagcatgccagctccaaagctgagacaggaaccagggggcctctatcagaggccctgcgtgtcatatcgtgcccacaggctgttcctctttgtgtatcgttaataacttacaacgtgactgccacactgccccgaaggactgccaagggaacagaaaaggcaatggcttgagtccagtcccttttcagggcagtagcactccaaaggggcaggcatcgtgactgcaggaacatgcaagtttctaacgtgagagctgtgcagaacaccagacaacgaaaagtgccctgaccagagcgtgcaggtgtgtctcctagaaagaggcctcacctgagacgccactgtcccttagtcaacttcccaagaacagaataaaaaagggaacttccaaggctgctaaggccgggggttcccaccccacttttagctgagggcactgaggcagagcggcccctaggtactaccatctgggcacgaatgcaataatggttactaaagattcacaacgtctgggagcctgcacagggacaggagatggctgcagatgagaagagcctggctagccacagccacttaccagcggacctcaggtatcatagcctgtgggaccctgagccaaagggtttgcccaaggagaatgggcaaacaggttacagggtcctggatggggaagggggcacctgggctgccttctaacaaggacagagtctcttggtcattgcctgtccttcagctgtcactcctctgcattaaggcacacagttattagacactactaccgctatccacaaagacaggggactgtggatctcaaccagacatggctgaaccaagagaaactgaagatgtcgtgagaagctcagaaaacgccaggagaagctgaataggaatctgcctgcaaaccatcagggcaaggaggcaataacaagtgacagagccaacgagtgacagcaaggaattgccctgtgatgaactaacaacaaagctgggctgacctgggctaagctaggagtgggatctgtgctgcactgggctggaaggagccgggatgagccaagcaaagtgggttggactgagttgaattggcctggactagtttgtgttgggctgggctggcctggaataggtaggctaaaccagcttaaactagggtaggctgggcttaactgaatcagactaggctagactaagcagaactgggctgggttgaactgggctacactagcctggtctgatctaggataggctgggctaagctgagctggactggctggactgggctgagctaagttgcactggacagagctgggctggagtggactggactgggttggattgggctggactgggctgggctaggctgagctaaattgcactggacagagctgggctagagtggactggacagagctgggctagagtggactggactgggctgggctgggctgggctgggctgggctgggctgggctgggctgggctgagctgggctgggctgggctgggctggactgggctgggctggactgggctggactgggctggactgggctgggctgggctgggctgggctgggctgggctgggctgggctgggctgggctgggctgggctgggctcagcaggcctaagtaggcctagctgggtttagctaggtttggctaggtaaggctgagctagattggactggactgaaccaggtggggtatattcagctgacattgtttggtctggtctggactgaactggactgagccgggctagcctaagctagatggggggtatactcagctgagatgggctggtctggctagattgaactggactggactaggctgagccaggctgacctgagatgtcctgatctgggctgaactgggcagggctggtctcagctggactacactgagttaacctgggctgaaccagactgggctaaactaggttgtactggctggattagacttggctaaactgggcttggctaaactgagtcaggatggtctaggttgatttttagttgggctaaactaagctgaactacactgaactaggcaagactgggctggaaaggtctgagttaaattaggagggacttggctgggctgggctgggctgggccaggctgggctgagctgggccaggctgggctgagctgggctgagctgggctgagctggattgagccgggctgaactggactgagctgggatgagctggactgagctggactgggttgagctgaacaaaactaaactggaatgggctaaattggcctaaaattggctaggctaagctaagtaaggctgccctgagctgagaaggactggattggcctggactgagtttggatgagcatcattggactatgctaagctaacttgggtgaagtgggctaagcaggactaatctggcctgatctgagctagaccaagctaggccaagctcagctaagtttagcttagctgaattaggctgggctggactgtattgagctacactaaatttaacaggctgagctgagctgagctgagctgagctgagctgagctgagctgagctaagctgagctggttttgtctaaggtggattgacctgggctggactgaactcaattggactacactgaacttatctggacctcactgagctgtgctgcactgggccaaccctggatcactctagatctagcttagctggactgggctgagctagattgggtggactgatctaggctgaactagactattcttgcctgaggaaggctgggctatgctgagttgaactaaactgaactcagctaaggaaggctaagctagactgagctgagctacgttgggttgggctaaactgggctgagctatctcgggtagactaggctgagctagactaaattgggctgagctggagttggttggactggactgggttgggctaagctgagctgatttggtgtaatctgggatcaggtggcttgagctggactggactgtctgagctaaactgggttgagtggagctgagtgggtctgagtgaggctaggctggaatgagctaggctaaactgggctgaactggtttaggttgaatttagctgagatgagctgggctagacttctataagatggctgaactctgctagggtgaactgagctgtgctgagctgaacttggattaactataattagttgagctgggctgaactaggctgagtttagctggaataagagtcaactgggcccaactgagctaggctaagctaggctgaactgggatgagctagaattactgttctagtctgatctggactaaggtagactgggctggggttgagctctgttgggctaagcaaagttgagctatgagatgaactaggctgaattgggtacttctagatcattccaggctgttctgggttgacctgaactgggtgggattgagctaagtggggtaggctatgctgagctctgccaggctgcatgagtttattgatctgaactgggacaggctggaatggactggcctgagctacaccaactgggctaagctgggataggtcaggctaggaggagtcaagctggactaggccaaactattataggtcttttggtctagttgaactttctggtgcttaactgaactgtgtttaagatcgattgctcaaaccagagggaggagaagcccttggccctgccaaggctggaccccacacacacaccagtgtaggggaatgtcaggacagagaggtggaaaggggtgggtggttgggtgggggaaaagtgataacatttgaaatgtaagtttaaaaaaaatccaaaaaataaattaatttaaaaaaaaatagattgctcgaaattttttatggatgtttttaactgttctccaagaagattgtcctgatatagtagccagactatatcagggtaggtagagacaatcaggtttatcagaaatatcctatgctttctgggggcctggcacagagctgaactgggccccaggctcaggagaatgtcacgggcatgcgggcactccagaataatttaggcagccatcaaggtggcttctgaagtggttgtattctctaactgtgtgctgtctaggatctgcagaggtcactaggaggcagaacactttgcaggttagcctgtggtaaagccaagagccccatgaatctgaaaggctgagaccaatagccctaggaaacaagggtctcacagttctgtcattaatgtgtcccaaaacagatttaatgtgtctcgccaaggaactggtgctcctgggaaagctctgaatccccaggtcccaaaagtggggacggaagatacaaaagtaattcactggatctctgggttcccaagccctttggggtacctgtgtcttggatttaaagtatagcctggtccctctggcaatatcatacagcctaccttaaagctactccattcaccctgagaacctaatggcttccagtctgccacccagttctcctgcttcatttatgggcatatcagagataataccactgtcaccctgcttaaaggacagacaggaaataactaacacacacatccccaaaagttctcagtcaagaaagagagcaaagttgcctcttcctccaaagctcatacccagccctcctggaagcccctgtgctaagccagctaggggcagtgagcaaagcttggcagagcatcaataatcaggggcctccctgggtttgtgcttgggtttagagaatgaagacaagacccagaaggagactgtctcctagactggaagagaatccccagaaccctgctcctgtcacagctgccctaatcagtcccctatgctgcaggcatgcagtgatctaaacaaatctaacctaggtccttcctgtcccacagtttctgtcaaggccccttcactctatcccttgaagccctgtagcagcgaaaacacggcttcggtgacattgggctgcctggtaaaggactacttccctgatccggtgactgtgacctggtattcagactccctgaacacgagcaccatgaacttcccgtctatcggttctgatcttaagaccaccaccagccaaatgaccagctggggcaagtcagccaagaacttcacttgccacgtgacacatgccccatccacattcgtcagtgacttgactatccggggtaagcagggttgagctggttacagttaccacaagagggaacatggtcagagcagaaaggaccgctcatatatacctataacagggggccaggggacccaacatactcaggggcctggtttgaggcttgaggggacataaggttagggagatactcacagctcactgcctctgccctagctcgacctgtcaacatcaccaagcccactgtagatctactccattcatcctgcgaccccaacgcattccactccaccatccagctgtactgctttgtttacggccacatccaaaatgatgtctctatccactggctaatggacgatcggaagatatatgaaacacatgcacaaaatgtcctaatcaaggaggaaggcaaactagcctctacctacagtagactcaacatcacccagcagcaatggatgtctgaaagcaccttcacctgcaaggtcacctcccaaggcgagaactattgggcccacactcggagatgctcaggtaggcccacactcgcctgatgctgagacctcagagttctgaagggaaggcaggctcttacgcagcccttcctctcttacagatgatgagccccggggtgtgattacctacctgatcccacccagtcccctcgacctgtatgaaaatgggactcccaaacttacctgtctggttttggacctggaaagtgaggagaatatcaccgtgacgtgggtccgagagcgtaagaagtctataggttcggcatcccagaggagtaccaagcaccataatgccacaaccagtatcacctccatcttgccagtggatgccaaggactggatcgaaggtgaaggctaccagtgcagagtggaccaccctcactttcccaagcccattgtgcgttccatcaccaaggccccaggtgagcacaggagatggagagtgggccggcccttctctgtgttcagatggcacggttaactggttaactcgtgtctgcccacaggcaagcgctcagccccagaggtatatgtgttcctgccaccggaggaggaggagaaggacaaacgaacactcacctgcttgatccagaatttcttccccgaggatatctctgtgcagtggctgcaggatagcaagctgatccccaaaagccaacatagtaccacgacacctctgaaatacaatggctccaaccaacgcttcttcatctttagccgcctggaggtcaccaaggcactctggacacagacaaaacagttcacctgccgagtgatccatgaggcacttcgggaacccaggaagctggagagaacaatatccaagagccttggtaacacttccctccgtccctcccaggcctccatgtagctgtgatggggaaggtgaatggcagacatctgcccactgttgtaacactgggaagccaccccaataaacactcagtgcctgattagagccctgggtgcccttcttcggggaaggtgggttgtgggcagaagtatcttggcctgaaagaagggaaaccccaagagagggacaggagtgaagcatggctcacccatctgtctatgtgttgggtatttgacaaataggacatcacagggcttcagcatagataaccctggtccttcctgcccttcactgtatcatgcacctgaaagggatccaaagagccagagaggtggtctctagagatgtaggtaaaatgaaccaacctgagaggcctcggcacccacccctcagtcttgcaagctcctgctcccaggtattcctggatgctggaactccttaaggtagagaaacagccaaagtcaacatctggaaaggcagaagtcagcatggccctgctccttccctctgtactcagcagccattgaggctgagcctacggccctgacctcctgtgtgccatgtgatcataccagacccggatcagaacctggtgctcctcatctttcaacccaaagtcatcccaaggcccagaatgggaagccagcttcacacagttgggttctcccatctatgccatgttctcacacacacacacacacacacacacacacacagagccacaaacactcaggccaccaagtcttaaagagactccaccaacagcacacacttgcagccacctgacacaacaacacacctcacccatgttcacatgtggcctgcgctaggcttcagtctgtttccagtcctttaccttttacacttgagtccaaaataaaaacagaagacttacgccctgagggagagaccagtgtcttcttcctgtggcctcagctcccagaacactcttccctaccttctacaacactaagacagtaagatacacccacacgaacataaatacatacacacacacacacacacacacacacacacacacacacacaccccaagtaggcttcatcatgctctttggtttagcaatagcccaaagcaagctatgcatccatctcaggcccagagggatgaggagaccagaatcaagacatacccacgcccatcccacgcccaaccaccaaccaccagcacatacggttcacacacctgagaccagtggctcccatcacacacacacacacacacacacacacacacacacacacacacacacacaagcccgtacacatccaccatatccagagacaagtgtctgagtctgagatacctctgaggatcaccaatggcagagtcggccagcacctcagcctccaggccaatccttatactttggcccactgcaggccatgagagatggaggaggtggaggcctgagctgtggaaaaccagagacaggaagatggtctgtatggagagagtagtaaaccagattatagggagactgaggcaggagtagagctcctacaaggccagtagtctaccttagagtcctataagtctgggctgggagtccatgtgtcctgacttgctcctcagatatcacaaccaagattcctggagccagagtgtgcatgcaggccttagaaatggagcttagagcccttcctggagggccctgggcactctgaacaaaaggcaattctgtaggctgtatagaggcatcctgtcagatacacacacacatgcacacacatacacacacagagacacagacacacacacatgcccacacacatgcatacacacatgcacacacatacacacacagagacacagacacacacacatgcccacacacatgcatacacacatgcatgcacacacacacacatacacacacacacacacacacacacacacacacacacacacacacaccccgcaggtagccttcatcatgctgtctagcgatagcccttttgagggtgggagatactgggtcatggtgggcactggagtagaaagagggaatgagcagtcagggtcaggggaaaaggacatctgcctccagggctgaacagagacttggagcagtcccagagcaagtgggatggggagctctgccactccagtttcaccaggactgcctgagaccagtgagggatccaccctgccacactgtcacttggagtctggggacgctaactggctggtccccccatcccagagctagacatccaggacctatgtaccgaagaggtggagggcgaggagctggaagagctgtggaccagcacttatatcttcatcagcctgttcctgctcagtgtgagctatggggccactgtcactgttctcaaggtgggatcctgcacctcggtgggtgggtcagggaggtctaggccaagctgcagcgccatcctcacatacacctttcccccaggtgaagtgggtcttctccacactgatgcacgatacaccccagaccttccaagactatgccaacatcctccagaccagggcatagatgcgatgccagcacccgtgcaggcctgcagccatgtgtgtctgagcctcctgaggtgcctgtttgccttggatggtaggtgggagcagagacccctaaaggcaccagagttggtgagatgtcaacatgtagaaggtgcggcttggggcagcaatgtgggctgtcccgcatggatactttgagacaggactttgaagagcctcaatttgacctatcaaatgctggtcacccaggtctttcagcatcagggtcactccatattgactgaataaccacaaaagcacaagaacccagagcctagagtccccactaggccccacctagagcacagagtcaaagctgggacactcagaatcaacccaaagtccagacccttgctcctcagaaggaatcctgccccactgcttccagacagacctctggcctaggcagatcgtcctactgccagataaggagcctcccacagggcagcagcagactcaagctctgaggccccatcaaccccagccccagcctggcagtcctactttgtctctggtctctttagtaaagttcttttccataactcctgagagtgctttgagaaggtatttaaggctaccattatggtgatgacaggtcccaagaacatggacaaggaccagatggtaagagcctggggattaaacatccacctctatgccatcctcctcaaaccacagagttctgccccagtctccatccggtccatcattcctgctgaccagactcacctcccaggggaattgaggtggaatcagggctgggcccccgggaacctggctgcaggtcactcttcaagaccacaatctgcccacccagtaagtgcagactgacaggccagtcccctgacccaagctgggacactagagggactaggtaacagcacgcaagtgtacaagaaccatccaaaatgggttgtgccatcctcaagacatgatctcacatgacaaaagacaggcttctctcatatataatgattgctcagggactaagaagaaagacctcttcatgggacggaaaaaccagcagtcactgtttttttcctgaagaaaatgcttcaatggtgagaacacttctagaaagaaggatgttagggtgagtgtggccctgctgggccctgggtaaagaaaggcatgagaactacttagaccattttgagggtcagttggccaaacactcttgtcatcacaagtgacagtctcacaaagaggtccacactggggtgtcaagctcagcaccaggggactttgggggaactaagatagggataaaccagccgggatcaggccatagtccacaggcatctgagccctctgctgctgagtccggcttctacgggccttggagtagggcccagatggcaaagacacagaaagctacccctcctgggtgcagaagacccaggactgggagaatgactgttctgatgagaaaagaggctctgtttaggatgtgtcccaagccattagtgtggccagcttactaatgtgcattcatgctgcaaaccattgctcacaatcaaatgtataccacgcacacagtcacgtagtttgcgcagacccactcatgtggcacatgcctgtgggcacatgggaccacacatacacgtgatgctttaaaacacagatctgcacggtcttgtacttagacacacattgtctcaggaagcccaggtgtggaccaccctgtcctcctgccacattctcctaagccatatcccctgccaagctgaggcctaggtgcctcttcctcaaccagctcctagaccaacatccctgaggcatagctcagtgtcttcttctaatcactatccctccaagccacgagaccccatagacactggacacgggcagcaagggttcagctcaaagaacacggtgtggcaggaactcctaccaaatcccaactagaaggaaggaaagtcccacagagagctagactcactctagacaacccagacagtgaccctggcttctacataccatgaatgaatgaccttctgagactaagaggtcgctttcttctctattcctacattatcagtccaccatggagggctacatggaaaaccccaaaagacataatcacattttggaacccataaatgtagcctcttgggaatagttcttcatcaatgtgaccaaggtaactatctcaagacgaggtcatcaaggactagctagtggactttaacctggtgacaagagtcataagagacagaagcaggacctagggggtaaacagggcctgcattctccaaaatcaaagtgtcaaaacagaaatatggcagcaaaacagaagtaccgtgcccaacactggtcaagaccaatgggggaggctcatgaggggttgcctaacaagagcaggcacaagtgcttagataaaaccacaacctacactcggccaccgtaaccctacatagaaaatgtacctatgggacgtcagctcaacgtcagtcccacctcgttgctgtgcgcagacagctgcagcctgaataacctgtccaagtgtgcatgtcacatccttgatgacacactgtaaccagtgatgccatgttagcacgatgtcctgtgagggtgtcttctgactcgggatggcaaaccctaagaccaaaaggaggtgcttggttcacgagagcggcctcgtggctggacacatggcgttaaatgagcctctgtggactaggaagcagctttaaccagaaagactataccagcaccctgcttcacgtttccacctttgagcctctactgactaagccactggcagccactcagcctgtggtattctctaacggcaacagaaatgactaagacaggcaaccacaatgtcccccactgctgatggctccagggcattcttggcctgatgacaggacctccagagcctccttgagacaggcagatctctggagggcaggaccaagctttctcctctctacctccccaacatctttgactagcttcacagataaaaggctagggggacatcagtttattccacactttctaagtctgatgcaggagcccttcctctgcgaagtatctatccaagaacccagaaaaggctaacttccccaactcaacacttagcaccactgacacacctgaccatacccactgatttacaacctttctcccagacagggccattcctgggcaaagactgtggtgtgagggcccagagtcctattgttgtataaatgaggcacagtggcagaggcaagctacaaagagtgacattgtggagagaggacactggggacagtcggatgtgtagaggatcatatgaagggtggagccctaccctgacaatctacaaagagtgacattgtggagagaggacactggggacagtcggatgtgtagaggatcatatgaagggtggagccctaccctgacaatcttcaagaggctccataggtcaaaggcccatcctgagaaagctgtgataggaaattgactcagggcagatgggatccaaatgagggtagcacctaactgtgacctacagacctccatgttggtcctcaagttggggcacccactttctcatggacgtagccatggaggtagccacagctcgtgacaagccattccagacacttgcctcaccccgttgtcaaccctgtgacctcaaagctcttctctgaggcccccctcagcttagggacccctctggagtagccctgttactttggctccttgacaacaagctctcaggtctcccttctacccctaattgtcctctccctctccatctctgccttggagtctctgagaaactagatgttcatttcattccctcctgcatctcctgcccaacctacccctgtggccatgcatgtggagtcctggccccatccaggcccgtgtggtcagacacacctgtctccaccacagccagaccacaggccagacatgacgtggaggtaagcggccacaatgtggaggtggaacaggaagtgggtgagggaccccatccaggggccagacacacagtcgtgcagccccctcaccgctcagtctgacccatccacaggcaaccacacacagagaaaaccagtttccagccaaggcttcacccagtcctaagctctctccggtagggcagacggcctttagccatgagaatggaccttcagggtgggaccacctggccatgggaggcctggctgttcccctatgaatgacactcaacaaccttgagcaggtgggtcccggtaccatctggactgctctgctccttggtgcactggggaatctcaaccaggccagacctgagaacataaggcagagaagcattagcaaggagaaggtgattcggagagcaagaaccagaggaatacaggacatgaacacaggcacgaggcggggtcatggtctgagctgcagagaagagagaaaaatggatgaaactcagcttcctggaaagcagcaacaagagactcccaggctagactgaggcaaggataaggaggcatcaacaaagaatgggggtgactcgggctgccatggctcagctgagctggatttagccaggctgagctgaactaagcttagctgaggtgaatgagactgagctgagctgagctgggacaaggtaggccaagttgggctgactgagctagtctagactggtctgggctagtctgatctggactggtctgagctgaactgagctaagttgagctgggataaactgggctgaggtgggataagatggcctgacttgggtaactaagccagtctagaattggataaactgaactagactggtccaaactggactagactgagctggactgagttagaatgaggtggactgggctaaactgggctgagctaggttaagctagggtggactagaatgctgatttaagatggcctggggtgggaacgctagctaagccagaccaagctgggctaggctgggttaagttgagttgagctacagtaaactagcctgggctgtgctgaccttactacaccaggctgggtttggttggcatgaatggagctgatttgagctgggctagaccaggttagtatgagctatgctgtcctggtctaagtagactgggtgaggctgagaaaattcgagatggaaactggactgagatggaaaaagataggcttagtgttggcttactgaaccagtctagaatgagctgaactggacttggaatggcctgaactgggcttagcttatctagcctgggcttggctaggctggcctaacctaggctgagttgatctgaactggtgtaggctgggataggcttgctgaaatggactaggtcaagctgggctggagtggggttagctaaaataggtggactaggctgagatgagttaggatgacctgagctatatttaggggatggatgggatgggatgggctatcccaagctaagctgggctagaatgggctagtgtaagctaaactggctgggttggaatgtgctgggctgtgctaagctagaataaactagagtggactggccaaaatcggctgggacggtctgtactgaaccaggctgggctgggctaactgagctagaccggtctgaggtgagctaatctgggatggggcggactgagctgggataggctagattaagctgggatgagctaggctaggctcactgagctaggctggaatagaccggtctaagataggctgcctgagctaaactagactgagatgaactgtaatgagctgggatgagctaagctaatctgggatgatctgggctaggctggaatggactgagccgagctggtctcagctgggctgggttgtgctgaatgggggtaaaccagactaggctacccagactaagctgggctgtgctgggccaagctgggctgagctagggtgggttgggctcgatggctgggctaatccaagctaggctgagctgagctggactgagctgggctggacggagctaggatgggattgactgagctgagctggactgaaatgggctgagctgagctaggctgagattcgctgagctgggctgagctggactgagctggactgagctggactgagctggactgagctgggctgagctgagctaggctgagattcgctgagctgggctgagctgggctgagctgggctgagctgggctgagctggactgaaatgggctgagcagacctggacaatgcaaggctgcactgaactgtccggctaggctatactgggatgagctgagctgggctggtctcagctaggcttggctgtgctgcatggaggtaaaccagactaggctacccaagctaaactgggctggaccaggctgggctggactgagctgtgctgagctggactgagctgggctgggctgggctgagctgagccaggcttggtttggctgagctgagctgagctgagctggactgagctagactgagctgggctgagctgagctaggctggactgagctggactgagctgggctgagctgagctaggctgggtttggctgagctgagctgagctggactgagctgggtgagctaaggtagactggaattggctgagctaagctgagctggactaaactggactaagctggactgagctgggctgagctgagctaggttaggattggctgagctgagctggactgagctgggctgagctggactgagctggactgaaatgggctgagaagccctggacaaagcaaggctgcactgaactgtctggctaggctatactgggatgagctgagctgggctgggctaagttgacttgggctaggataaactaaactgggatgagccggggtgagctgcatgaggtaggctggaatggctgagctagactaggccaggctgagctggaatgagccgagttgagctgagctgagctgagataaacttagtaaggctagaatgaattgagctgagctaggctgggccgacctaaagttgctctgaggtaggttagacatggttgtctgagctgggctgagttaggctagctataccgtctgggctgacctaatatgcccatattagttgtaatgacgtgacctaggttgaaacgggcttgctgatctgggctggactgggccaaactggagttagtctagcctgggctgacttagtgtagcctgggcagagttagactggaatgggctacactgagctgaactaggatgggatgggaagggataggctgaactgactgagctgggttcagttggccttgctgggctgagctgggctggatagtctagctgggctggccagaatgaggcagagctaggctggaattaggctaaacttggtttggctggttaagatgagctaacataaattaggctggctgaactacactggactgtaagctagcctgggtgagttcgcatggctggacgtcttcacagctctagtctgagttttactggtttgttctcctcagtgctgaggtaatagaaagactttggagtaaatgtgaaccaactcttgtttcatgggtccagactgtggcctcagtttgtcttatatgaacggagccacgccactcagtgtccaattctcatgccctcttctccttccctgattacctggtggaaactcacatgtacctgtagatagtgcctacatggacagaaccactgctcagatttagtcctctggccttttggtccactgcttgctgggtggatgggcaggtggctggagtggtgggtctgaagccaggacaaggcaagtataaagtaaaaacacaacaaaatggcccccaccccccagtgtaacctccaagccagctgttccccaaccattcctgccctgtgctggctgaggttggccgtccctgctcaggcccaccagttctggacctcctaacctgggactgagaacacggctctacccactgcccaagcaggagtggggctcagaaatctggggcgctagactgctcaggagcatagccatgtttacaaagacactcacagtgcgtacaagccctgctggaggcatctagccagatccttgaaaaagacaacctgcaggtcacgttcaaaatctatgcagccagtcggtcagctccaactgcgggtacatgatgcaacccctatgtgatactgggcctaggttctccggtataaagaagaaaaaggcatggtcctttctccagagattgtctcaagatgggcagtgtgaggactactatctcactcatgttttatgttccagagtccgcgaaagatcccaccatctacccactgagacccccaccatctccgtcaagcgacccagtgacaatcggctgcctaattcagaattacttcccatccggaactatgaatgtgacctggggcaagagtggaaaggatataagcgtcataaacttcccacctgccccagcctctgggccatacaccatgtgcagccagttgacattgccagctgcagagtgcccaaaaggaacatctgtgaaatactatgttcaatataacacaagccccgtcagagaattgagtgtggaatgccctggtaaagaaggttgggggggtctggggtgggctaagtcctaccttaacctggtatctggacccatatacccctctgaagcacacatcccactcagaaacctcccatgggggatggggggagggggtgtgaacaggcagagggagcagaggcctcagaacatccagaaaaggggacagcaaaggagaaaaggagactattctgatttgctaaaacttctatgttacaggtccaaaaccctccttagtctgccgccctcgcctgtcactgcaacggccagcccttgaggacctgctcctgggttcagaggccagcctcacatgtactctgagaggcctgaaagagcctacgggagccgtcttcacctggcagcccaccactgggaaggatgcagtgcagaaggaagctgtgcaggactcctgtggctgctacactgtgtccagcgtcctgcctggctgtgccgagcgctggaacaatggagagaccttcacatgcacagctacccaccctgaatttgagacccccttaaccggcgaaattgccaaagtcacaggtgggcccagatgcatacctgggacattgtatgatgttccctgcttgcgtacctgctttcttcctctaatacagatgctcagctgctcaggcccttgtgtcacagagggaaactggagctatccaaagaactgcccagaagggaagggcagagaggtctctgctctccttgtctgagccataactcttctttctaccttccagaaaacaccttcccaccccaggtccacctgctaccgccgccgtcggaggagctggccctgaatgagctcgtgtccctgacatgcctggtgcgaggattcaaccctaaagatgtgctggtgcgttggctacaagggaatgaggagctgccctctgaaagctacctagtgtttgagcccctgagggagccaggcgaaggagccatcacctacctggtgacaagcgtgctgcgtgtgtcagctgaaacctggaagcagggtgcccagtactcctgcatggtgggccacgaggccttgcccatgagcttcacccagaagaccatcgaccgtctgtcgggtaaacccaccaacgtcaacgtgtctgtgatcatgtcagagggagatggcatttgctactgagccaccttgcctgcccctactccttaaataaactctgtgctcatccaaagtatccctgcacttccatccagtgcctgtccatcatccttagggtctacaaaacactgggaggggtcagggcccagggaaggaggaacccccaccacctgagcttgtaaggcctcagagactctgaaggacctacatgcctagagtatatgtgtatgcatgtatacgtattagtgagtgcctttgcgtgtgtacctgtgtgtaacaagagaggagtgagtttgtgcgtgcctacgggtttatataggtatgtatatgggcataagtgcatacgcctttaagtgtgagcatatctgtgtccccgtgagcacatgtgtgtctgtgtatgcctatgagtgtgcacgtatctgtgtatgctcatgttggtggaaacatgtgtgcctatagtgtgtgtacctgccaggtggatgtgcaatgaaagggaggtgagaatgggggtgaagtccgagatgagcagattcagccaagacaggcaaacctcaggggagagtcccaagagcagtgggttgctgcagaggtactctgaatggtacttctgaatggtggtgtggctgtctgagtataagattacagcttttgtcccaaacaagaaagggatagatggagcaagagagtagcaagaccaaggctggtactgcctgggagtcacaataggaacggtagaggagtgaggagatgaatccaaggggcactgggaagaagatgccacccaccctcagtgggccagccctgaatggagacgtgcatagccactcagggtgaccactgactcatgagaaagagacataacatggcacagacagccctcagcagcaccctgctctgcatatatgcacatgggcatacaccctggtctgcatacaggtacatgggcatacacgcacatacatttgcacactcacacagacccgaaccctggaggaggacgaagttcacagcccacacgcagcttctggaaagcaatgggagtcccctcccaagcccaaccatgacaactcatggacaagtctataagctcctccaggtggcccctttctaacctaagtctcccttcccatcctgagcccaagtataacaaaccagaaacagggtatgtggcaagctgggaaaagacaggagcaggccatagagaccactctcacacaggccttggcctcctccatgggcacccctagaacacaaagttctacaaccaggtacacttggcacccagatgcccacaagagggcagtggggcccctgctcctgtctcacgggccttcagaacctctccaggggcctggtttctagcaacttccctctgctgtcagagcaaggcccatgcacaccctggataccctccagcttgaaagtccacttccccgaggatagcaaaagcgacaggccagctttggaaacctgacccagaaaagcacgatagccacccatggaacccaaggcctggtccaaaacagaattctagtaaggaggagccaataggtgaaagactgaacacacacagggagagaagacagaggagcacgatagtcgagagaggggggctggtgggtgaggcgatgagtgagtgactggaacaaggttgggtggatatgcagatgaatgatgggaatggtggatggactgatggatggctgcagtgacagaaatatgagtgactgagtatcggcacacagtccctacctccacttaaaatcaaagttctatgcgcggagactctgagggcagtggggttgtctctaccgggagactttagtgttggttaacccccccccaagttctttataatgcaacagaatcctctgaccacatgtccaccccttggtattccaacctcggcccagaaatcaccttggcctgtatctgtttgagagtgtccgatcttaccgaaccctagtacccaggccaagttcaacctaagaactggggcttttgtgaggtgttgctaaatgtctagagaggtctgagacaagtggccttgggctcaaactcttctcagagcctcaaagacagaaacaactctcttaccatgatagttctctaattaagatcccctgagggaaagagagagagtcaggtcttggggggcatctcaagaacttcaaggattccagccccttacctgggaccctgccttctcattatcccagaacaagtcccttctcagagataaggaacccctgccaccaccgtccccaaagcccaagggggcatagaaacagaggccttaagcctgagcccccatccccatgggtttggatctagaaggtcatctatgtcttacagaatgccaagagccaccttcctacgtgatactggaccagtcacaagacatcctggaggaagagaccccgggtgccagtctgtggcccaccgctgtgaccttcctcaccctcttcctactgagcttgttctacagcacagcactcaccgtcacaactgtacgaggcccatttggcagcaaagaggtcccccagtactgaccaggagccagccacaggtggctgtcatggagacggtggggtacagggtgggggcaggggccttgaggatttactcagcccctccacatgtggccttgcaacccttcacagacatcaaggaagtggaaggaagtagaaggaaattatggcagcacttcctgggtttaacccagtcttccagaagccaggctgagacctcagcaaaagcaaagacataacccaactccaggatcctcccctctggctgaccacttgtgtctttgcacggatgaagcttggagaaagtcctctatgtttcagagactgatgtgacagcttcccacccgactcccatactttgctgagcaataaactggtgcaaaagcacagtttcttactctcaaaaacaaaagttaacaaaggattgggtgagggggtcagagatagtgtggtggtgccatgctaaactgttgcttacggtatagaatgtggcagcattgggcagggcagacacagggtgaccactgtctagtatccgagacaaccgtgtgtagctgtagccaagatgaacactgactgacttcaacaagtatttgtggcctcttcagacccaataccaggccattagcttgatctctggacctgacttctaaacatttggcctctgtgaacacccttgccaaacactggtcctggttgtgaaccttggtcctgaatactgagccttatcttggtaactgaaccataatcctgatccctgacctcagtcacgatcatgaaaccctggtcctggccactcgttccaataactggtccctagtcctgagccctgagtcctggtccaggtcactgaatcctggtcatgatcaatgggtttggtcctcattcctgagcctagtcttgatcactgatcactggttctgatcattaacaactaacctgatcactagtccccattcctaatcactgggccgcgatactgatcactgaaccctgtttctaaacaatgtgtagtgaaatgtatggtaaaacctttgcatctggctttgagtgaaatgtttcggcagacctttgctatgttttgggttagtcaggaaaggctgagaaatggttttgaggctgtttgaaccttgaagaaatgttgtctccctggacaatctgcacttggtactacattaaggtttgcagttgcacacaccttggtcctaaacactcctggcagacttagaactcttacgtttgattatggctagccatagttgaaaagggctgagagttgtatgggtggtctgctctctctcgcagcaagggcaagatgactttggtagttgaaaactttcccagccccaactaactctgtataatgtttgaataaagtaacggcagtaggctagttgtggttaatttttattccaagaagaatgaacccctctgctccttcagaaaaggaaggcttagcattttggtgagcttctctctactgaggcacctatgaccaactcagtgttctttgattcctgtcaccacatccagtcttgatcactaagtgccagtcctcatcactaaaccctggtctccaccagtctgcttgggttctgataatcagactcacattctgataactgggccctgattctggtcactagctctttgccctggtcatggacatttgaccctagtccacggcactgagttctgggcatggaccctgggccctagtcctaggtactgggttctggttctaacaactaggtcctgtactgatcaatgggccctgacctagacattgggccctggtcctcaacatcaacttctaagcctgaactctagccccaaattctgcttatcaacactggtcctggaccttggtcctcatcacacatccattctctgagacccaaggaatcagtggtattttgcaagaagtccctttgatattccaagcctcattctcattaggaagatctcttcaggggattcctgcagaaggttccagaatccccaccacactgttcacatactgggctgcaactgggacagtgaccccttttgctcatggaaacaaagcaggcccaggccctgtgagctggagcctctggcctggggtctacagatgtggggtcagcattgtggagaaggtttgcagggcaggtgtgggggtagggcagggatggtcacattagcatcttgtttttctttcttctgaagtctctgttttctatcacctgctgaaacattcaaagtagctccaagctgaggccagctgagtcatcctgagcctatctcagcccaggtgcctcaaaacagagctactgttctgagaatcacaccaccctggaccaggccaggtgggtctggggctggatgaggggtcagagccaggggagccctgacagggactgagaaggccccaacccccatcactcaaggttctccacaaccatccacagtcatgccttagtgaggccatgttctgtcccaatgagaacaagtccaattaagattaagtctggtcttcccagggtcattcagtgtcaaggagtgtcaaccaaggccagccaaggccagcctgaggtcagccagcatcacccaaggacacacaactattctagtagacaactagaatagtcagctcaacagggccctggtgatgcaaaatggagagtgtattcctgccagacagggctccacagataggctccctcactgcatatgacctccctgaatgtttcccacactgcagttggttctagactacttcttgataagcatgcagaaagataacaggataagaaattttatgcagagaacagaagtatctacggaatagaatagaagatagatagtagaagtctgctacaggccccagtggagtctctttgtagagtcaagagatcaaacctaaactgagtctcaggattgagtccagtacagaagcaaccttcaggatgctaaagaccatacaggcaatggacagaatggagtccagacagaccaatgagtggacagtccaatctcacataatgaaccatgtcaagagcagatagtgagccaaagaaggctctgggacactcggagattctcggcctctggatctcctgatgtatataccaggtgatcaagtgacagtctagtggagccattgccatcacagtgtcaggtgtcctccccttcatgggttccggtgaggatgtggcacctccctttagttggacgtgtacaataaattctcaggcctggtatgatttttaatgatccatgtgtttctatagtcttaattatctttaataaaattatagggtgacaccaaatttagggataagttatttatcaggctgtgcctttggaaggtgacgttatttacatagccaccaaggtgcccagtcatcggcccatcttccaaacggagtcaagggccatttgaaacagtgaaatccctcagggcaagggacacaacatggaggaatttaaaacagagtacagcttgatcttaacacacacacacacacaaacgtaagagatggaaaaggggatcaagggacacagaagtacagagaaaacaagacagtaagggatgtagagatgagaggtaaccacagggaaaggtgagacacaaagacgagaggagaaagacacagggacagaaagacccatgcaagcaagagagacagacataaggaagaaaaggcgagaagagacagacaaaggtgcagcaatgtggcccacctggtactcacaagaaggccctggcacacactccgatgagagccatgcacctacaaacacgtagacacagctccacacagacacacacggcatctgcacaactgtctgaacctcaaacaggtctgcccactccctctcctccaggcctttgtccttaggaaggcacgctgagggtaactcagtcgggatacttctgattggggctcactgaacagcctgaggctgggtccacagttgctctcactgtctggccctgtaccccaggtcatgcttcagagggaattaactgaatgcagtaaacaccgtctgtggtcagcatgtactaagggatagaaccctatcaggatttgtccaactaaggtccaaatacagagtgaagaagacgatgggggagatcagatggcagatgggagcactctggatagagctcagggatatggtggctgaggaacattacagctgccaggcttggcctttcatctcagctctaggtcaaggggaactacccaggtctctgctttgttgctggtaactatacctaagtctaagaacctcagtaagacacagaaccagtaagacgacagcctccatcgataagaaagaaaggagaaaggcagaatggataagtctctggacagatgagagcctacacccaaaaacagttcgttcagccagttaatagggtgtagccctagcacacgagagaaaacagttccacaggtgtaagggagtaaatctgtgcgaaggggtactgcttgagctcctcatggcctggtccagaagcagaagctgggcaggggcaaaggacagggtaaggcagggagacaggggcatgaaggagcctttgggactgtgtggtgagaactaggctgtgcttttactgagcctgagtttgtggcagttgcctcatggggaaggcacccagaggtaaggcagaggaaaggagtaactagggctgagggcaccacagggtctgaggaattagaggcagctatgacccatttgtcatggtatttggacatgtacttcatggacacagatctgagaaccaggcctggctctcactaaccagcaggaggtgtcccacttgtggctgtaggtctttcagcacaccatgccatgggcctctcacactggacgatctgtctgaaaggctgatgttgggaggtgggagcccaggcctggggtctgggacactgggtgacagaggtgtccagaatgtagagtgctcagagtgtgggtggggacaagctgtagagtgtccccatgaggggacaggctgagatagggactgaagtccatctacaggcttaccacactccatgctctggatgagagcactgagctctgccaccctacaacagcaggcagagcggcctccatgctaggaaagccaggcagcagggacagagttcctggatggggcaggtggaattgtctctgctcggcatcaaactaagtggaccttcagcagtaaggtcttactgtctagtcatggtggacagccaggaacatagtcaatgaacagcctgctttgtttggattcctctggagacttcctgatcaataacttgtaggcctccatgtttcatgtgacaacttacatctctctatgtataacatgggctttctgtgtagtcctgggtatcctagaacaccctgtgtagaccaggctggcttcaaacttgggacatcctcctgtctctgccttctaataaatgctgggattaaaggctgtgccaccacacacaatctaacccatttcttctgggaataacactgttcacccagccatacactgagttaaaattccttaataaatgttagttcatttacaaaatagtggatttccataaggcttcttcatggatcctaatccaacttttaccttctcttttccccaatcctccaatccccctattcccacttaaatctgaaatccccctccctccattttcaagctgcctgtgttctatgtcccctcatattgtttttttcttgtgtggaggtttgcagatttgaatgcaggaacccttcactggggctaagcctcctgccacccagcacttcccatccccacacctcctcacgcttgatttagcccatgtcccctcatgtgtatgggtgtttctcttcagtctgaggcattactccccgtgtcctctggagagctgcctactgtcacagatacctttcttctgtttctgctagggaaagcttttatttccccttgaattttaatcattgtctgggtgtaataccctgggttgagagctgtgttctttcagaacttggactacgtctatccaggcatctggctttaaagtttctactgtggggctgcagagatggctcagtggttaaccacacatttcttcttgcagaggacttgggcttgattcctagtacctccgtggcagctaagaaccatctgtgactccaactgcacaggattcgatgcccttttctggaggtcatctggagtagtcagctcaacagggccccgggatgcagcatggagagtccatgctgacaggcagggctccacagagagagaaagacagaaacacaggccactgaaagagacagtaatggactgaggggacagagagaaacacacggacagacagacagagataacaaaacaccgacactcatagacacagagaagagaggggacagggaagttttgagagcaatgggtaggaggtgagagagacacagaggcaatacatacagagagtgactccagaagacagagtctgagaggagacactgcaagagacagagaccccaaaagggttgagagcactggatgctttcacagagaatccagattcgattcccagcaggctcatggcagctcatactgcaatcccagttccagagtgccctgaaggatccttcatgcatgtggagcacagaagcgctctctctctctctctctctctctctctctctctctctctctctctctctcagatgaaagccatgaaccagaagacagagacatgagtgaacactcctcagagacatagccacagcactcacacccagttccacacagacacatacagcacctgcctgcctgatccaaaccccaaacccattgacccactccctctcctccaggtctttgttctcagagtagcacactgagggtagctcagcctggatacttcccaaggggcctggacacacagcatgcatctctggtccacagcccccatcccttgttggccctgtaatccatgtgatgtctcaggagaagatgttgtctgagagcagggcctggtacagtgtccctggtacagtgtccctggtacagtgtccctggtacagtctctctagtaaagtctctctggtacagtttccctggtacagtcttcctggtacagtgtccctggtacagtctctctggtaaagtctctctggcacaggatgcctagtatagtctttctggtacaatctgcctggtacagtctgcctagtacagtcttcctggcacagtctatccctggtgcaggcttcaggtcaggcccaagtgtgaagagtgcagaagacagtgggcagagctgagagagcgctagtcagttttgttcagagaacagtgatggccgctccaggctactggacatcccaggtgtgcttcttacacttctcaaagctgtgggaacacaaccgaccctctactcacttcagtgtaattgcctatagcagggcatgcctctgggcatcagggagtcacacagaggcaggtaagactctagacctggggactgagaggggaaggcatgtacaagagggcctcatccttaggacacagggattcgaggcctctggatagccagtgagcaacatatgcagagtgatgaggccccaggagtctaatggacgccaggaggtcacagagctagaggcctggagggctagagtctgtgggaagggggactgcttaggttcttcccacccatgtccaggagcagaggctgggcagggccacaggacagggtaaggcagggagacaggggcatgaaggagcctttgggactgtgtggtgagaactaggctgtgcttttactgagcctgagtttgtggcagctgcctcatggggaaggcacccagaggtaaggcagaggaaaggagtaactagggctgagggcaccacagggtctgaggaattagaggcagctatgacccatttgtcatggtatttggacatgtacttcatggacacagatctgagaactaggcctggctctcactaaccagcaggaggtgtcccacttgtggctgtaggtctttcagcacaccatgccatgggcctctcacactggacgatctgtctgaaaggctgatgttgggaggtgggagcccaggcctggggtctgggacactgggtgacagaggtgtccagaatgtagagtgctcagagtgcgggtgggaacaagctgtagagtgtccccatgaggggacaggctgaggtagggactgaagtccacccaaggctcaccacactccatgctctggatgagagcactgagctctgccaccctacaacagcaggcagagcggcctccatgctaggaaagccaggcagcagggacagagttcctggatgggacaggtggaattgtctctgctctgcatcaaactaagtggaccttcagcagtaaggtcttactgtctagtcatggtggacagccaggaacatagtcaatgaacagcctgctttgtttggattcctctggagacttcctgatcaataacttgtaggcctccatgtttcatgtgacaacttacatctctctatgtataacatgggctttctgtgtagtcctgggtatcctagaacaccctgtgtagaccaggctggcttcaaacttgggacatcctcctgtctctgccttctaataaatgctgggattaaaggctgtgccaccacacacaatctaacccatttcttctggaaacaacactgttcacccagccatacactgagttaaaattccttaataaatgttagttcatttacaaaatagtggatttccataaggcttcttcatggatcctaatccaacttttaccttctcttttccccaatcctccaatccccctattcccacttaaatctgaaatccccctccctccattttcaagctgcctgtgttctatgtcccctcatattgtttttttcttgtgtggaggtttgcagatttgaatgcaggaacccttcactggggctaagcctcctgccacccagcacttcccatccccacacctcctcacgcttgatttagcccatgtcccctcatgtgtatgggtgtttctcttcagtctgaggcattactccccgtgtcctctggagagctgcctactgtcacagatacctttcttctgtttctgctaggggaagcttttatttccccttgaattttaatcattgtctggctgtaataccctgggttgagagctgtggtctttcagaacttggactttgtctatccaggcatctggccttaaagtttctactgtggggctgcagagatggctcagtggttaaccacacatttcttcttgcagaggacttgggcttgattcttagtacctccgtggcagctaagaaccatctgtaactccagctgcacaggattcgatgcccttttctggaggtcatctggagtagtcagctcagcagggccccgggatgcagcatggagagtccatgctgacaggcagggctccacagagagagaaagacagaaacacaggccactgaaagagacagtaatggactgaggggacagagagaaacacacggacagacagacagacagacagacagacagacagacagacagacagagatagataacaaaacaccgacactcatagacacagagaacagaggggacagggaagttttgagagcaatgggtaggaggtgagagagacacagaggcaatacatacagagagtgactccagaagacagagtctgagaggagacactgcaagagacagagaccccaaaagggttgagagcactggatgctttcacagagaatccagattcaattcccagcaggctcatggcagctcatactgcaatcccagttccagggtgccctgaaggatccttcatgcatgtggagcacagaagctctctctctctctctctctctctctctctctctctctacactgtccccatgaagggacacgctgacgtacggactgaagtccacccaaagctcaccacactccatgctctggatgagagcactgagctctgccaccctacaacagcaggcacagcggcctccatgctaggaaagccaggcagcacggacagagttcctggatggggcaggtggaattgtctctgctcggcatcaaactaagtggaccttcagcagtaaggtcttactgtctagtcatggtggacagccaggaacatagtcaatgaacagcctgctttgtttggattcctctggagacttcctgatcaataacttgtaagcctccatgtttcatgtgacaacttacatctctctatgtataacacgggctttctgtgtagtcctgggtatcctagaacaccctgtgtagaccaggctggcttcaaacttgggacatcctcctgtctctgccttctaatccatgctgggattaaagcctgtgccaccacacacaatctaacccatttcttctggaaacnnnnnnnnnnnnnnnnnnnnnnnnnnnnnnnnnnnnnnnnnnnnnnnnnncagtggcacacacacatacacacacacacacacacacacacacacacacacacacacatacactctaatgaaggcagtggcgcacacacacactctcagatgaaagccatgaaccagaagacagagacatgtgtgaacactcctcagagacatagccacagcactcacacccagctccacacagacacatacagcacctgcctgcctgatccaaaccccaaacccattgacccactccctctcctccaggtctttgttctcagagtagcacactgagggtagctcagcctggacacttcccaaggggcctggacacacagcatgcatctctggtccacagcccccatcccttgttggccctgtaatccatgtgatgtctcaggagaagatgttgtctgagagcagggcctggtacagtgtccctggtacagtgtccctggtacagtgtccctgggacagtgtccctggtacagtctccctggtacagtctccctggtacagtctctctagtaaagtctctctggtacagtttccctggtacagtcttcctggtacagtgtccctggtacagtctctctggtaaagtctctctggcacaggatgcctagtatagtctttctggtacaatctgcctggtacagtctgcctagtacagtctccctggtaaagtctgtccctggttcaggcttcaggtcaggcccaagtgtgaagggtgcagaagacagtgggcagagctgagagagcgctagtcagttttgttcagagaacagtgatggccgctccaggctactggacatcccaggtgtgcttcttacacttctcaaagctgtgggaacacaaccgaccctctactcacttcagtgtaattgcgtatagcagggcatgcctctggacatcaggaagtcacacagaggcaggtaagactctagacctggggactgagaggggaaggcatgtacaagagggcctcatccttaggacacagggatttgaggcctctggagagccagtgagcaacatatgcagagtgatgaggccccaggagactgatgggcaccaggaggtcacagagctagaggccgggagggctagagtctgtgggaagggggactgcttaggttcttcccacccatgtccaggagcagaggctgagcagggccacaggacagggtaaggcagggagacaggggcatgaaggagcctttgggactgtgtgatgagaactaggctgtgcttttactgagcctgagtttgtggcagctgcctcatggggaaggcacccagaggtaaggcagaggaaaggagtaactagggctgagggcaccacaggatctgaggatttagaggcagctatgacccatttgtcattgtatttggacatgtacttcatggacacagatctgagaaccaggcctggctctcactaaccggcaggaggtgtcccacttgtggctgtaggtctttcagcacaccatgccatgggcctctcacactggacgatctgtctgaaaggctgatgttgggaggtgggagcccaggcctggggtctgggacactgggtgacagaggtgtccagaatgtagagtgctcagggtgcgggtggggacaagctgtacagtgtccccatgaggggacaggctgaggtagggactgaagtccacccaaggctcaccacactccatgctctggatgagagcactgagctctgccaccctacaacagcaggcacagcggcctccatgctaggaaagccaggcagcagggacagagttcctggatggggcaggtggaattgtctctgctcggcatcaaactaagtggaccttcagcagtaaggtcttactgtctagtcatggtggacagccaggaacatagtcaatgaacagcctgctttgtttggattcctctggagacttcctgatcaataacttgtaggcctccatgtttcatgtgacaacttacatctctctatgtataacacgggctttctgtgtagtcctgggtatcctagaacaccctgtgtagaccaggctggcttcaaacttgggacatcctcctgtctctgccttctaatccatgctgggattaaagcctgtgccaccacacacaatctaacccatttcttctggaaacaacactgttcacccagccatacactgagttaaaattccttaataaatgttagttcatttacaaaatagtggatttccataaggcttcttcatggatcctaatccaacttttaccttctcttttccccaatcctccaatccccctattcccacttaaatctgaaatccccctccctccattttcaagctgcctgtgttctatgtcccctcatattgtttttttcttgtgtggaggtttgcagatttgaatgcaggaacccttcactggggctaagcctcctgccacccagcacttcccatccccacacctcctcacgcttgatttagcccatgtcccctcatgtgtatgggtgtttctcttcagtctgaggcattactccccatgtcctctggagagctgcctactgtcacagatacctttcttctgtttctgctaggggaagcttttatttccccttgaattttaatcattgtctgggtgtaataccctgggttgagagatgtggtctttcagaacttggactttgtctatccaggcatctggccttaaagtttctactgtggggctgcagagatggctcagtggttaaccacacacgttgttcttgcagaggacttgggcttgattcttagtacctccgtggcagctaagaaccatctgtaactccagctgcacaggattcgatgcccttttctggaggtcatctggagtagtcagctcagcagggccccgggatgcagcatggagagtccatgctgacaggcagggctccacagagagagaaagacagaaacacaggccactgaaagagacagtaatggactgaggggacagagagaaacacacggacagacagacagacagacagacagacagacagacagacagacagacagacagacagacagacagacagagataacaaaacaccgacactcatagacacagagaacagaggggacagggaagttttgagagcaatgggtaggaggtgagagagacacagaggcaatacatacagagagtgactccagaagacagagtctgagaggagacactgcaagagacagagaccccaaaagggttgagagcactggatgctttcacagagaatccagattcaattcccagcaggctcatggcagctcatactgcaatcccagttccagggtgccctgaaggatccttcatgcatgtggagcacagaagctcgctctctctctctctctctctctctctctctctctctctctctctctctctcagacacacacacacacacatacacacacacacatacactctcaaatgaaagccatgaaccagaagacagagacatgtgtgaacattcctcagagacatagccacaacactcacacccagttccccgcagacacacaaatcacctgcctccctgttccaaatcccaaacccattaactcactccctctccttcaggcctttgatttcagagtagcacaccgagggtagctcagcctagacacttcccatgggacctggttacatagcgtgcacagggccacctcttgttggccctataacccatgtgatgattcaggaaaagatgttgtctgagagcagggcctggtacagtccccctggtacagtccccctggtacagtctctctggtacagtctccttggtacaggcttcctgatacagtctctctggtacagtctctctggtacaatctgcctcgtacagtctccctgatacagtctgcctggtacagtctctctggtacagtctgcctggtacagtctccctggtacagtctccctgatacagtctgcctggtacagtctctctggtacagcctctctggtacagtcggcctggtacagtctccctggtacagtctccttggtacagtctccctgatacagtctgcctggtacagtctgcctggtacagtctctctagtacagtctgcctggtacagtctgcctgatacagtctgcctgatacagtctgcctggtacagtctccttggtacagtctgcctggtacagtctgcctgatacagtctgcctggtacagtctctctggtacagtctccttggtacagtctccctgatacagtctccttggtgcagtctccctgatacagtctctctggtacagtctgcctggtacagtctccctggtacagtctccttggtacagtctccctgatacagtctgcctggtacagtctccctggtacagtctccctggtacagtctgcctggcacattctatccctggtgcaggcttcaggtcaggcccaagtgtgaagggtgcagaagacagtgggcagagctgagagagcgctagtcagttttgttcagagaacagtgatggctgctccaggctactggacatcccaggtgtgcttcttacacttctcaaagctgtgggaacacaaccaaccctctacccaattcattgtaattgtctatagcagggcatgcctctgggcatcagggagtcacacagaggcaggtaagactctagtcctggggactgtagaaggtatgtaagtacaacagggcctcatccttggaacactggtgtctcaggcttcaatacagccagtgagaaacacatgcagagtgatgtggccccaggagactgatgggcaccaggaggtcacagagctagaggcctggagggctagggtctgtgggaagggggactgcattcactcttcctatgcttgcccaggaacaactgtctatgcagggccacaggacagggtaaggcagggagacaggggcatgaaggagcctttgggactgtatgatgagagtctaggctgtgctctgactgagcctgagtttgtgacagctgtctcatgaggaagacacccagaggccagacagaggaaaagagtaatcagggctgagcggaccacagggtctggggacgtggaggtggctggcctggctcccacaggccctcagatggagctgcacatcatcccatagcatatcactctggagggcttatcaaaatggttgtgctgtgggactgggtttcaggactgaggcctgagatactgggtagcagaacatgttcagtatacagggtgctcagagtacgggggggggggggacaagctctgcagtgttcctccatgttgggacaagcagaaagaggtcttgaagctgtttgtccatccataggcctaacccatactggccctgctcatggccctagcttgggccacatatctagtgcccactgaatcatcaccatgaagactgttggaaaaccagagcctctgatgtcttcctgccttgcttgctctccctgactctcatagctcacacaggctctgccctggtccaccactgtcctcaactgtaaaccatgccaggcacagagagcaaggaatgtggtggtctcagactgtcacacacaacaatcttgtgcctttcacatccacacgcacaagcatgctcatacccctctgtcaggggtcagtggggtcttccttgggctcactcccatttctagctgctccttggtattggtgactgcggctgctgtgtcggtggctgccagagatgcttgatcggcatgacctcagatataggaatggcctggggtcaacagagtgcacacacttagggcactggccagagttctatgtagaccaaggcctctcttcctagtgtgttatttcacaaaaccttatgcaacaacatcttctattccttttattcctctttgtctgctaatggggaattttctagaaagagtgtcccctctctgtcttcctgctgtgtagacagatcttgtaggtgtgatcacagagtggtgtttcccttcttggccattttcaggccaggaactcagggccagagacagaaagtcaggaaggtaggaaagacagggagacataataaaggtgagatggagacagagaaagacaaagggagaaaagcacaggattgcagggagagacaaggagacgcccgacggaaacagacatcagggaaaagacatgattgttcctttagtaaattgctttccggagaaaagagacagcagagagacatggataggcacacaaagatacaaggagagagacaggaaacagagaaagagagaaacagagatggagaaacaacgagggagagagaagagtagagagaaagacacggagaaaaaaaatcaagaaacagaaaagacaaaagataggaagacagagaaataggccagaaatacagacagacagagagatgcctgaagatgttctctctcacctagagaaagaaagcacaggcagagataatacagagagagagagagagagagagagagagagagagagagagagagagagagagagagagaggagagaaagaggagagacacggtgttagaggagaaagcattatgttttgatagagacagagatacagcaactgaggaacagactgagcagaaagaatcccactcagagagagacagaggctaagctgggagaggcaggggtggccagagagggagacagaggagagcctgtgggacaggtcagacaccatcttggaagacccagtgacaagccagggaggtgacaggttagtgcagtttctaccccacagtccacaggctggagccacaggcctgtgtccatgtggccacaggctagctcccagcctgccaagcctgtctgtggagggattgcggagtggggctgggctgaggcaggccaggatttttccagtggagcagccagtgactgggctgagggtcactgcccaccatccccgtgattctgggtagacccaggacctggagcacacacagccttcctgtctctcccacttccctggggtgtttggaccttgcctatctcctgtcattccctcctagggtcagattccagcagtgtcgataaatgggaaaacactgaattcaatgtcaccgttaggggtcatggaacccccagccccatccccaaagctggtcaacctggccagggtggggtgaacctgcagctgcaggtgggggaatcattgatgctatttttggctcagagaatgagaaacatgtttttctgcatggaacaaacatccatttgcatgtgccccgagggccaaccctgcacagagtgagtcactcggcaggtgtgtgtgtgtgtgtgtgtgtgtgtgtgagagagagagagagagagagagagagagagagagagacagagacagagacagagacagacagagagacagagagacagagagagagacagagagagacacacacagagacagagagacagagagagacagagacagagagagacacacacacagagacagagagacagagagagagatgttgtgagcaagccctgtttcaggtactgatatctgtgcccccgtgccccagcccatgtggaaaaactacccttaggggcccattaactcatcacagtccaggccatcatggtgagccctagctgacctaagcaggttccaccctaaacatgaaggaaaataataaaggccatctgttacccagaatcctagggatggtgggcagtgaccctcagcccactcctggccgctccactggaagaatcctggcctgcctcagcccagccccactccgcaatccctccacagacaggcttggcaggctgggagctagcctgtggccacatggacacaggcctgtggctccagcctgtggactgtggggtagaaactgcactaacctgtcacctccctggcttgtcactgggtcttccaagatggtgtctgacctgtcccacaggctctcctctgtctccctctctggccacccctgcctctcccagcttagcctctgtctctctctgagtgggattctctctgctcagtctgtcagccatagttggagagagtccatctatgtttgcctctgtctctgccaattccatcagaggtctctctactaacacttgcctctgcatgtgtctcttggtccttctcctgtcttcccatctctctatctcctcatctctctgtctttctgttactccctgtctctgtctctctgtcttttctctcactgtctttatctctctgcctgtttcatggacttttctctgtctctctgtctctgtctctctgtctctctctctgtctctctctgtctctgtctctctctgcccctatctcttggtctctatctctatcttcaactccctatctttgttcctcatactcacatttacctctttcccaagcccccagtctccaggtctgcctgtttctgtctctcccttgccatgtttccctgttttattctctctcctcctgaatgctctggcttgaaactggccaagaagggaaacaccactctgtgatcacacctacaggatctgtctacacagcaggaagacagagaggcgaccctctttcaccctacagtgtctggacttggttgattccaggttactcctatactcaagtccgggactatggtggtcaagcatctctggcagccactgggacagcagctatagccaccaacatcgagccctgttagctaccaacattagctcctcaaagaggttgggtctataggcctctggtgtgaggagatgttgacagtgagaattagttcccaaggaggacaccactgtttcctgttagatggagaactacagtgggtacgaacatgcttgaacacatgagtgtcaaatgcacaagactgttgggtgtgtcacccttcccctctctgttcatggcatgactgcacactgaacacaatggtggattgggacagagtctgtgtgagttgagaatcatgaagagtgtagacacttcaaggatagtgtagacccttctagttcgtggtgatggctcacttggcactgagtttctgaccccacagggaccatggacaagggcagtatgggctgtgcctatggatacaaaagagacttcgaagcctgtattagcctgtcccctcatggaggaacacagcacagcttgtctctacccacactctgagtactctacgtcctggacacctctgtcacccagtgtcctaggtcccatccttggctcccacatcacatctgcctttcagacagatcttccagtgtgacagacccatttcatggtgctgaacaacataaacccatttcctgagggttggtgagagccggcctggttctcagatctgtgtccatgaagtacatgaccaaataccatgacaaatgggtcatagctgcctctaattcctcagaccctatgggccctcagccctggttactcctttcctcggcctggcctctgggtgccttccccatgaggcagctgccacaaacccaggctcagtcagaacatagcctagttcctaccatacagtcccaaaggttgcttcatgcccctgtctccctgccttagcctgtctgtgctcctgcacagacaagagttcctgggcaagcataggaagagtgaatgcagtccctcttccaacagaccctagccctccaggcctctagctctgtgacctcctggtgtccattagactcctggggcctcatcactctgcatgtgttgctcttgtacatgccttcccctctcagtccccaggtctagagtcttacctgcctctgtgtgacttcctgatgtccagaggcatgccctgctatagacaattacactgaagtgagtagagggtcggttgtgttcccacagctttgagaagtgtaggaagcacacctgggatgtccagtaacctggagcggccatcactgttctctgaacaaaactgactagcattctctcatctctgcccactatcttctgcacccttcacacttgggcctgacctgaagcctgcaccagggacagactttaccaggcagactgtaccaggaagactgtaccagggagattgtaccaggcagagtgtgccaggcagactgtacaaggcacactatatcagagagactttaccatgcagactgcaccagggagactgtaccagggagactgtaccagggagactgcaccagggagactgtaccaggccctgatctcagacaacatcttttactgagacatcacatggattacagggccagcaagaggtgggggctgtggaccagaggctcatactgtgttaccaggtcccatgggaagtgtccaggctgagctaccctcagtgtgctactctgagaacaaaggcctggaggagagggagtgggtcaatgggtttggggtttggatcaggcaggcaggtgctgcgtgtgtctgtgtggaggctgggtgtgagtgctttggctatgtctctgaggagcgttcactcatgtctctgtctctggttcatggctttcatctgagagagagagagagagagaaagagagagagagagagagagagagagagagagagagagagagagcgcttctgtgctccacatgcatgaaggatccttcagggcaccctggaactgggatttcagtatgaactgccatgaacctgctgggaattgaatctggattctctgtgaaagcatccagtgctctcaacccttttggggtctctgtctcttgcagtgtctcctctcagactctgtcttctggagtcactctctgtatgtattgcctctgtgtctctctcacctcctacccattgctctcaaaacttccctgtcccctctgttctctgtgtctatgagtgtcggtgttttgttatctctgtctgtctgtctgtctgtctgtccgtgtgtttctctctgtcccctcagtccattactgtctctttcagtggcctgtgtttctgtctttctctctctgtggagccctgcctgtcagcatggactctccatgctgcatcccggggccctgctgagctgactactccagatgacctccagaaaagggcatcgaatcctgtgcagctggagttacagatggttcttagctgccacggaggtactaggaatcaagcccaagtcctctgcaagaacaacgtgtgtggttaaccactgagtcatctctgcagccccacagtagaaactttaaggtcagatgcctggatagacaaagtccaagttctgaaagaccacatctctcaacccagggtattacacccagacaatgattaaaattcaaggggaaataaaagcttcccctagcagaaacagaagaaaggtatctgtgacagtaggcagctcttcagaggacacggggagtaatgcctcagactgaagagaaacacccattcacatgaggggacaggggctaaatcaagcgtgaggaggtgtggggatggaaagtaatgggtggcaggaggcttagccccagtgaagggttcctgcattcaaatctgcaaacctccacacaagaaaaaaataatatgaggggacgtagaacacaggcagcttgaaaatggaggatgcttttagcattaaagatttacagtgtagnnnnnnnnnnnnnnnnnnnnnnnnnnnnnnnnnnnnnnnnnnnnnnnnnnnnnnnnnnnnnnnnnnnnnnnnnnnnnnnnnnnnnnnnnnnnnnnnnnnnnnnnnnnnnnnnnnnnnnnnnnnnnnnnnnnnnnnnnnnnnnnnnnnnnnnnnnnnnnnnnnnnnnnnnnnnnnnnnnnnnnnnnnnnnnnnnnnnnnnnnnnnnnnnnnnnnnnnnnnnnnnnnnnnnnnnnnnnnnnnnnnnnnnnnnnnnnnnnnnnnnnnnnnnnnnnnnnnnnnnnnnnnnnnnnnnnnnnnnnnnnnnnnnnnnnnnnnnnnnnnnnnnnnnnnnnnnnnnnnnnnnnnnnnnnnnnnnnnnnnnnnnnnnnnnnnnnnnnnnnnnnnnnnnnnnnnnnnnnnnnnnnnctcattcctctttttttggcggccgatggcggttatattccttgcgtctcccgtatccagaaataataatcattcaaaacggtgttctcctcagccagtgtatgccttttggattttgcttccagcagcaccgagtggagaggagaggagaggagaggagaggagaggagaggagagatgttcagttatccaaaactaaggatccatgaagaagccttatggaaatccactattttgtaaatgaactaacatttattaaggaattttaactcagtgtatggctgggtgaacagtgttgttcccagaagaaatgggttagattgtgtgtggtggcacaggctttactcccagcatttattagaaggcagagacaggaggatgtcccaagtttgaagccagcctggtctacacagggtgttctaggatacccaggactacacagaaagcccgtgttatacatagagagatgtaagttgtcacatgaaacatggaggcctacaagttattgatcaggaagtctccagaggaatccaaacaaagcaggctgttcattgactatgttcctggctgtccaccatgactagacagtaagaccttactgctgaaggtccacttagtttgatgccgagcagagacaattccacctgccccatccaggaactctgtccctgctgcctggctttcctagcatggaggccgctgtgcctgctgttgtagggtggcagagctcagtgctctcatccagagcatggagtgtggtgggcctgtggatggacttcagtccctatctcagcctgtcccctcatggggacactgtacagcttgtccccacccgcaccctgagcactctacattctggacacctctgtcacccagtgtcccagaccccaggcctgggctcccacctcccaacatcagcctttcagacagatcgtccagtgtgagaggcccatggcatggtgtgctgaaagacctacagccacaagtgggacacctcctgccggttagtgagagccaggcctggttctcagatctgtgtccatgaagtacatgtccaaataccatgacaaatgggtcatagctgcctctaaatcctcagatcctgtggtgccctcagccctggttactcctttcctctgccttacctctgggtgccttccccatgaggcagctgccacaaactcaggctcagtaaaagcacagcctagttctcatcacacagtcccaaaggctccttcatgcccctgtctccctgccttaccctgtcctgtggccctgcccagcctctgctcctggacatgggtgggaagaacctaagcagtcccccttcccacagactctagccctcccggcctctagctctgtgacctcctggtgcccatcagtctcctggggccacatcactctgcatatgttgctcactggctatccagaggcctcgaatccctgtgtcctaaggatgaggccctcttgtacatgccttcccctctcagtccccaggtctatagtcttacctgcctctgtgtgactccctgatgcccagaggcatgccctgctataggcaattacactgaagtgagtagagggtcggttgtgttcccacagctttgagaagtgtaagaagcacacctgggatgtccagtagcctggagcggccatcactgttctctgaacaaaactgactagcgctctctcagctctgcccactgtcttctgcactcttcatacttgggcctgacctgaagcctgcaccagggatagactgtgccaggcagactgtaccagagagactgtaccaggcagactgtatcagggagactgtaccaggcagactgtatcagggagactgtaccaggcagactgtatcagggagactgtaccaggcagactgtaccacacagactatactaggcatcttgtaccagagagactttaccaggcagactgcaccagggacactctaccagggacactgtaccagggacactgtaccagggacactgtaccaggccctgctctcagacaacatcttctcctgagacatcacatggattacagggccaacaagggatgggggctgtggaccagagatgcttgctgtgtctccaggccccttgggaagtgtccaggctgagctaccctcagtgtgctactctgagaacaaagacctggaggagagggagtgggttcatgggtttggggtttggatcaggcaggcaggtgctgtgtgtgtctgtgtggagctgggtgtgagtgctgtggctatgtctctgaggagtgttcacacatgtctctttcttctggtgcatggctttcatctgagagagagagaaagagagagagagagagagagagagagagagagagagagagtgtgttgctgccttcatttgagtgcttggtgggctccatgctgtacctctgccttccctgtgtgtctgtccttttgcctctcccttcctttggcctgtctctcttgtctgcatctgtctctcttgtctctccctctctgtgtctcttttctctcctgtctctgtgtctcttctttcctgtggtctctcctcatccccatgtctgcatcagtgtctatcagtctttaactctgtgtcctcttgttcccatttctgtccctctggatatttctgtctttctgtgtgtctgtcctcatctctcccagcgtccatgtctttgtgtccctttgtccccacacagtatcttctcaaatactctgtgtgcctggtcccctgtctctcattccttttctcactgctcccatcagtgtttctctgtgtctctgcttctgtgtctctgtgtgtctgtctcatgctatctctttctctctcattatctctgtctccctcagacttctctgtctttcttggtctctgtctccctctgtgtctctgtctttctgcatgtctaatgtctctgtgtctcccttagctcatctctgtctctctcaatattcccacaatcccctttattctttgtgtctctgtctctgtggtgtctctttctcagtctctctgtatttcgctctgtctctcagaatctctgtgtccctcatattatttttcgaagtgtctccctatctctttcagtaacactatttctgtttttctcagtctctctctctctctctctctctctctctctnnnnnnnnctctctctctcagaaagtctatggcacctcttctatgtgtgtcccactctggacctggatcaatcttccttcttggacctcagtttcatcagttgtgagacgataccttgccagaagtccagaggactgtctgtcctccatagtctagaccacctgtgatctgagagatattgggacaacggatgtgcagtgagggacctgcctttctgtggagccctgtctggctggaatacactctccattctgcatcaccagagccttgttgagctggctattctagttgtctactagaatagttgtgtgaccttgggtgatgctggctgacctcaggctggccttggctggccttggttgacactgaatgaccctgggaagaccagacttaatcttaattggacttgttctcattgggacagaacatggcctcactaaggcatgactgtggatggttgtggagaaccttgagtgatgggggttggggccttctcagtccctgtcagggctcccctggctctgacccctcatccagccccagacccacctggcctggtccagggtggtgtgattctcagaacagtagctctgttttggggcacctgggctgagataggctcaggatgactcagctggcctcagagtggagttattttgaatgtttcagcaggtgatagaaaacagagacttcagaagaaagaaaaacaagatgctaatgtgaccatccctgccctacccccacacctgccccgcaaaccttccccacaatgctgaccccacatctgtagaccccaggccagaggctccagctcacagggcctgggcctgctttgtttccattcagtgcctctgggaaaggcagatgagtaaaggggtcactctcccagttgcagcccagtgtgtgaacagtgtggtggggattctggaatcttctgcaggaatcccctgaagagatcttcctaatgagaatgaggcttggaatatcaaaggtacttcttgtaaaataccactgattccttgggcctcagagaatggatgtgtgatgaggaccaaggtccaggaccagtgttgataagcagaatttggggctagagttcaggcttagaagttgatgttgaggacctgggcccattgatcagtacagaacctagttgttagaatcagaacccagtgtctatgaccagagctcagtgatagggaccaagtcccaaggccaaatgatcaagaccaggacccagttgccaggaccaagatccaggtttcacaaccaaacctagttacgcagaccagaaaccattcgttggaatctggatctgaatcagagcccaatcacactactctaaaccagagttcagtgttgaggaccagggtacgtgatgagcccaagattcagagatcaagaggtggattcagtaattaagaccaggattcagagatcaggatcagggctcagttagcaggatcagggctcagtcatgtggtcatgggctcacggtccaatgtccatgcccaaaacacaactaaggacccagtggtcagaaccaaggcctgatgatcagagacaatacacactgctcagagctgaatttcagtggcaaggatgaagacataatgataaagactagggatcagtgagcagaaccagcgatgaggacccagacgcatctctgaagactagagtcagtgaccatgaccagttcaacgatcatgagtaggacttaattctgatcatacgagttcagtgatcacgaacaaggctcagtgatcatgacaagggctcagggaacaagagtgaggctcagcgatgaaaactggacctcagttatgagcccagtgatgagtaaccaggtctcggtcattagggccaggattcagtgataagaaccaagggtctctgcagggctcagtgcatcctctccccctgagactggacaaagccgcccagccacagggatggattctccagacaggcaacagcttcagggacagcccccccgtgatgcgccagagtaggggatacccaggggacttccacactctcaaagaagaaggggagaatggaacatgaagaagggactgtgaggggggaccgggaagtgggggacacagtgactgggatataaagtgaataaataaattaatggaaaatatcacatgggtgtagggaattttgaaagaataaataaaatgttaaaaatgaaaagaaaaaaagaccaagggtcaatgatcagggtgataataaataaataaataaataaataaataaataaataaataaataaataagaaaggaaagagagaaagaaaggaaggaagaaagaaagaaagaaagaaagaaagaaagaaagaaagaaagaacaaacgaactgaatgtcagaatttagggtaagatctcagtgatgaggatcagggatcagtggtttgaacgcagacacactgcccagggccattgttcaatgacgagagtcagggatcagctatcagaaccagggccagtaacgaaagccagggcccagtgaccccaaccaaaaaccagtgactaaaaccaaataaaatagaaactaggcagccacgatggtgcacacctttaatcccagaactcaggagtcaggggcagggggagttcaagacaaccctggtctacacagtgagttccaagacagccagggctacccagagaaaccctgtctagataacaaagactagaaaccatgagctcagtgatcagtggcagttcttgatgactaagaccatggtcaagaggactgatcagcaggactcagtggttagactcaggacatggtgatgatagcctctgttccagggatcagaaccaaggccaagggccaaggccatgactgagtcatcagaacagggcctctccatgagcactagtcaggcgcagccaggcctagcatgtcaatcaggcaaaattgggtatgtgtgtggtggtatgactgactatacatcgtcttagtatctgtctgaccccaccaccatcttccctgcctccgtccactcacagatctctgacgcgtcaccgcagggtaataactgatataattaaattgaagctctaatttgtgagtttagtatacatgcatttacttataatacagttttttagttttgctggccgcatcttctcaaatatgcttcccagcctgcttttctgtaacgttcaccctctaccttagcatcccttccctttgcaaatagtcctcttccaacaataataatgtcagatcctgtagagaccacatcatccacggttctatactgttgacccaatgcgtctcccttgtcatctaaacccacaccgggtgtcataatcaaccaatcgtaaccttcatctcttccacccatgtctctttgagcaataaagccgataacaaaatctttgtcgctcttcgcaatgtcaacagtacccttagtatattctccagtagatagggagcccttgcatgacaattctgctaacatcaaaaggcctctaggttcctttgttacttcttctgccgcctgcttcaaaccgctaacaatacctgggcccaccacaccgtgtgcattcgtaatgtctgcccattctgctattctgtatacacccgcagagtactgcaatttgactgtattaccaatgtcagcaaattttctgtcttcgaagagtaaaaaattgtacttggcggataatgcctttagcggcttaactgtgccctccatggaaaaatcagtcaagatatccacatgtgtttttagtaaacaaattttgggacctaatgcttcaactaactccagtaattccttggtggtacgaacatccaatgaagcacacaagtttgtttgcttttcgtgcatgatattaaatagcttggcagcaacaggactaggatgagtagcagcacgttccttatatgtagctttcgacatgatttatcttcgtttcctgcaggtttttgttctgtgcagttgggttaagaatactgggcaatttcatgtttcttcaacactacatatgcgtatatataccaatctaagtctgtgctccttccttcgttcttccttctgttcggagattaccgaatcaaaaaaatttcaaagaaaccgaaatcaaaaaaaagaataaaaaaaaaatgatgaattgaattgaaaagcgtggtgcactctcagtacaatctgctctgatgccgcatagttaagccagccccgacacccgccaacacccgctgacgcgaaccccttgcggcc

SEQ ID NO: 11 - DNA, 547891 bp, synthetic construct
  misc_feature 1..547891: note = BAC6-3 BAC3 Annabel seuqences in tandem
  variation 496443..496572: note = n is a, c, g or t
  variation 528461..528510: note = n is a, c, g or t
  variation 540084..540488: note = n is a, c, g or t
  variation 543645..543652: note = n is a, c, g or t
  source 1..547891: mol_type = other DNA
atcgctgcggccgatcttagccagacgagcgggttcggcccattcggaccgcaaggaatcggtcaatacactacatggcgtgatttcatatgcgcgattgctgatccccatgtgtatcactggcaaactgtgatggacgacaccgtcagtgcgtccgtcgcgcaggctctcgatgagctgatgctttgggccgaggactgccccgaagtccggcacctcgtgcacgcggatttcggctccaacaatgtcctgacggacaatggccgcataacagcggtcattgactggagcgaggcgatgttcggggattcccaatacgaggtcgccaacatcttcttctggaggccgtggttggcttgtatggagcagcagacgcgctacttcgagcggaggcatccggagcttgcaggatcgccgcggctccgggcgtatatgctccgcattggtcttgaccaactctatcagagcttggttgacggcaatttcgatgatgcagcttgggcgcagggtcgatgcgacgcaatcgtccgatccggagccgggactgtcgggcgtacacaaatcgcccgcagaagcgcggccgtctggaccgatggctgtgtagaagtactcgccgatagtggaaaccgacgccccagcactcgtccgagggcaaaggaataaagatcccccgaacacaacccacagctaccaccatcaacaatatttatatatataacgtacacatagaaatcacacaaacagagtatttattcttaactacatgaactaccatcagaccgtctgggccactatataatgtgccattcataaacgtgatcactttacgtagcaggcaaccccaggtgaaaatttttcagcgagctgccagattgtcaggtgaaaaactgaaaaaaacttctgggcgatgagcttgtggcgggaaattaagtatataaagcagttagtttcttctgcttcttgtggttctgggtattcttgtaatatttggaagaatagaaaatcaagactactgcctttcttttcatattatagaggaagaaatacgcacgaacacgatatagaggtaaagggggagtctggcaacccttcttgccactcatgtcccagctctcaccatgtgacatagcctgttccccctttgccttccatcatgattgtaaagtagatcctggtgccatgcttctcacacagccttcagaactgtaagccaaatgtgcctcttttctttgtaaatcacttggcctcaggtattaatttataggaatgcaaaagagactaacacaccgtccaaagcattacacagattcaactctatttttatcaaatgaccaatataattgattacatatttagaaaaaaaatactaaaattcctatagaatcaaaaaagagtctgaatagcaaaagcaatcctaagcaaaaagaccgaagctggaagcaccacattctctgacctcaaattatactacatgaatataataagaaagacagcatgctactagtagaaaaaaatagcccagaaagaaagccaaatatctaaaaccaactgttgtttgacaaaactgacaaaaatatacactggagaaacaaccctctattcaataagtggtgccgggaaaattaggtggcttatgtggaagaatagaactagacttccatatcaccgtagacacaaattaactgaatatggattcagtgtttaaatttataaactaaaactataaaaatacttgaataaaatctaaaaagagtcctctggacattggtctaagcaaacaatatatgactaagacttcaaaagcaaatgcaataaaaacagaagtagacaaacaggatttagttgaactaaaggtcttctgcacagcaaaagaaataaccaacatggtgaccagacaatctgcaaatggaaaaaatatctggaatctattcatcttgcaaagggctaatatatagaatctacaagtaactcaaataagtcaactaaaaattacaaataacttcattaaagaatagacataaacagacatttatcaaaagaatacacagaagtggccaacacaaataagaaaatatactcagcatcaccaatcatctgataaatgtaaattagaaacaacatgatacggcatcttccaccagtcagaatggctgttattacaaataaaaacagcaggtgtttgcagacaaacataggaaaaataatgatttatatatgcttggtgagaatgtaaattagtacaacctccatgaaaaacaacatagaaatttctcaaagaactaaaattagaattaccatttcttccagtaagctgtcccagtaggcatgttcctcccaaacttttatatcagagaatgttgcctgcactcatatgtttatttcaacaccattttcaatagaaaagtcaaataatctaagtgtcaatcagtggatgattagataaaatatgatatatgtaaatcatggaatactatgcagccagtatggtatgaattcagtgtgaccagcccctggacaagggcttgagtggatgggatggatcatcacctacactgggaacccaacatataccaacggcttcacaggacggtttctattctccatggacacctctgtcagcatggcgtatctgcagatcagcagcctaaaggctgaggacacggccgtgtatgactgtatgagagacacagtgtggaaacccacatcccgagggagtcagaaaccccgagggaggaggcagctgtgctgagctgaggcagtggtgcagcagtttctttaacttccatatgatctcattttgcatcatcttctacttttatattagctaagaacttggggtagacaggtgctcctaagagatccttaacttgcccattttgatgggttttccagaagacgtgagaagccactttgttagcaaagcatcccaaatccatgccctgttctagatacatgtgagcccatttcctggtctttgcttaactgacaagctctcatcagtgcacctgggctaatttcacatcaggtagaggaacgcgttataaaggaaagctaatgttgtaatagcaattcctgcttaaaaaccttcagcttcattgtttttgtgtaatccatcagcaaattatgttagttcaaggttctcaatgggagtttctaataaatagaaaggatgtataaagcttcccctaattaaaatgaaacaattgtgaacacaacctcggtattcagccatgtctccacccttcacacccttcgccacaaaggaattttcacctctcctggaagctgggttcattttcaaattagttatttttttcaatgtaatatctcaagattatcgtatatgactattttagcagaaagtgaattatgggaacttgaactaaacaactgaaaacaaattcacaactaattaaacaagatgccagaatgtgattggctccaggctttgtaattcagcagttcatgtacccagactggaaatttacatgtcttcttgttaccttcacagcacagtcaactcccattatgtaagaaatggtgactgcattcccaagggttatgcatagatatgaaaatagactgggtaaggtgaggagttgattgtttaaattcccctctgaagaagcagcatcaactcaacaaaccacctctcttcactctgtgactagagctatgtcacaggccacatggacctaaatccttgatggatataacatgactacataaattgggctgatcatttttatgctataaaattaatagatgacactgcactccagcctgcacaaccaagcaagtcttcatctgtaaaatctaaaaaagaaaaattaataggtactgacttcgaaatttttgataataatattttcaccacccaaatttaatcacacccacatgttacctgcatcttcactgaaaagttcccagtcacgatgagttccttcaatgctccatgtgttcaaatctggacatcaagagagtccagagaataaaacacaatgacggcagtgaaactgatatatattcagcacctcttaactcaggaggactccatacaccctggcacacagctgcttttctaaatggctcacaatgactccagctcactcacagagctcagacagaaacctcccttcagggtgggagctgggtggcagggggcactcagtacccgcagaggtgaaaatgagctttcagatggaacttccctgtcacctcaacatggaatttattgtttcatttcattacctctctttccataatggttcatttcttttggcctgttcattactgatatttttcagagcaatctcacttgaatctttactcttttgcattttgtctccttgacaatgttgggaagttttacctccagcatcataacatgatctagtgatctgacacattgtgcaaacaatacctacaaattcagaacctctttgtttttctttccacaaaatataattctttctgttctgtgtatgagcatgtcttagcaaccctgtacacacccacatagatgtctacaagcctatgaattgttctctgtaaataaaaatttatctcaaattccttcaatgttcataattctgagagtgaggaaggtccttctcaatctgttcaaacaaaatgcccagagaccatccagtaggtaaggagttcacctggctctggtgtggggtctgtctctttccctctgttgtcccacaggtcagcccagttgttcacgtcctaacaagaaagcccaggtttgtcctgattttaaaacacatcaaacttctgatgactctcctgttacccacatccatggagatagattatttattatataattcagcaaactaatgtcaaatgcccaagttgcaataccgcacatcctagggtatgttcatgcaattcaatggaggagaaaatctttcagagacagatggatctgaaatgataaatatgtgggtaaggactctgggcttgagtatcattgtccagccatgtttcacaagtgtgtcctgtcagggaaggatcagagttccttgtgctctcagagggaaggggtcacagagttcctctctggttcccaggaaaggtaatcgcactaatcttcatgatcttcatgagactatcctccagtgctgacctgttacggagtttttgtctgaagttctcactgcaatccccaatctacatattttcaatcagaagtgtttagaggccaggacacatcttcaaggtcacacattgagaagtatggagatatgtcccactaccttctcctacgatctcagacagaatcccaaatttcaaaaggacacagaaggacagctctcaggtgcttttaaaaaatgacccacttccagggacagtgagcttccctgtaaccatggtggatgttctgaactacaataaacattggatggatccagtattgtttgaagtcactgtcattattacattcagctgttgtttcaatgtgtctgaaagggtaaatgactatttagatggcctgggtgtgtggttggttttatatgaatctttaagggttgaacagtactgaccctattccaaaatctgtccttgatccaggatcacactcatctctcagaccagctccttcagcacatctctttacctggaagaagaggactctgggcttggagaggggaggccccaagaagagaactgagttctcaaagggcacagccagcattctcctcccagggtgagctcaaaagactggcgcctctctcatcccttttcactgctccgtacaaacgcaccacccccatgcaaatcctcacttaggcgcccacaggaagccaccacacatttccttaaattcaggtccaactcataagggaaatgctttctgagagtcatggatctcatgtgcaagaaaatgaagcacctgtggttcttcctcctgctggtggcggctcccagatgtgagtgtttctaggatgcagacatggagatatgggaggctgcctctgatcccagggctcactgtgggtttttctgttcacaggggtcctgtcccagctgcagctgcaggagtcgggcccaggactggtgaagccttcggagaccctgtccctcacctgcactgtctctggtggctccatcagcagtagtagttactactggggctggatccgccagcccccagggaaggggctggagtggattgggagtatctattatagtgggagcacctactacaacccgtccctcaagagtcgagtcaccatatccgtagacacgtccaagaaccagttctccctgaagctgagctctgtgaccgccgcagacacggctgtgtattactgtgcgagacacacagtgaggggaggtgagtgtgagcccagacaaaaacctccctgcagggaggctgagggggcgggcgcaggtgcagctcagggccagcagggggcgtgcggagctcacggaatacaaggccgggtcaggagcaggtgcagggtgagcggggcttgctcatcttctcagtcgtctccctcctcgccagcacctcagctttccgtagaggtcctctttctttattgtgtgtggttctacttcctcacatccttgtgccaggaaagaaaggagtaaggcaaattttcctgttacaattgaagtttcaccaattactaagaactttcctgcaagtacctgcacagcccattataccttatttatatatgtatatattctaatgcttctcaccatctcttgatttgtgtcatcaatttaattgtgccctttttgaaattcatatgctgaaactttaaatccaatggatctatatcggaattttaatggtataattaatgttaaatgtggtcataaatgagaccctaatgcaatagagctgttgtctttataagaagaggaagagacaccagatacctctcacttctcacatgcactcagagaagaggccacgtggagacatagtgcactagaaggtgggcctctgcaagccaggaagaagccgcaccaagaaccaaccctgccagcaccttgatcttctacattcagactgcagaattgtaagaaaatcaatatttgttgtttaagccacccactccttttgtcttcttacgaagacccagacaggctaataccacacaactctgttagctccgtctcctggagggagaagcagccccctgaagctgggcacatcgctcagattttcacatgaattaggcaaaaacagtagctctcatataaaaactgtcacgtccctgttgggacaaggtcttttaaacaagccctggggctttgtcacaaatgttgcattttatcctttattaggacttaactaattgacaatgagtaccagctggatggaaactgaccactgaccatcttctgctgtctccttattatatcacagaaaaccacagcaacattactctatgtcttcaactttctaaatttgtactgaatctattgctaaatgaggagctacatggggtctgagttttgttaccttcttcccagtcttccccaattaccaagcatagaagatactttcagtgaaatttagctgtcaatgcccccgacaccacatcatgttttaaggtccaaggactttctttggggggctattgaaaaacacttttgaatggaaaatcctaaagcatacaacagctgaaagaatggcccctgtgcacatgaaggctgaagggatggatgatagggtacgttcctccaaggtgttcctgggcatgtgatggttggatacctcatgcatacgaaaacaaggactgaactgagatagaaacaagggccatatcctataggaaaacaagaaaaaaacgggcatccctgaagagagttaattagacttggtgggtttaagatgaatttttttccaaagttttttaatgttctaagctaaatatgaatattttcaataaactgcaaattaaaaggagaatgaatttagaagtttagacagaaaaaagccatgagggtgtagaaagcaaatccacacaaaactgtcacatggcagaggccagaatggagctgatgcagctacatcattattctgcagacctagttgagaccctttggtgtttaaggcaggtccagcagtgaagaactcctttattttttgtctggcaaagttctaatctaatcttcatttctgaaaaggatttacatggtaaagattcgtcttggcaggttttatttatttttagtcccccccaacccacgtcaatttgagtaaagtcatgtgttacgtaacaatgctgcagtcaacagtagaccacatatatgtttgtggccacataatgttgtaataccatattttcactaaactttttccatgttttgatgtgtttagatagagagatacttaccatggtgtttccatttcctgcagtgttcagtgcagtaacacgctgtacaggttagttgtctgggaaccctgcgctaatccacataccctgtgtgtagtagggtattccttgtaggtttgtgaaaattcacccttgatgcttgcacaatgatgaaattgcccagggacacatttctcaaaaagaacctctgtcaataaaccacacaccattgaatacaatccctgtgccttctgaactgaaaaccttctgctgagaaatctgttccttttctttctgttttctaaagcctcttttatttccagcaatgtggttttaaactgtgtcacattttttgtcattgggtttatcttacgtaaaatttatagagcttcttcattgtggatgaatatttgcttcccttctccaaatttggaaatattttttgctattattttgaataatttatctcttctctctctctctctctctctctctctctctctctccctctctctctctctctctctctctctctctctctctctctctctctctccccctctctcccttcactaccccttttgtcttgtctttgtataactcctcaaatgcgtagttgagtgtttagtgtctttcctggcccataagtcttgaactcttttttatttctttcacttaaatttttcttctctgtctctactatttcaaatgatctttctttgagtttactgtttcttctattacttgatctagtttggtctaaaatcttgttaaaatttttggctgtattcttcaggatcaatatttttgtttagtcatcttttaaatgttttatctttattaaaattctcacattgttcttgcatgctgccactagctcattgaacatgtttctaacatttactttaaagtttctgtcaggtaatccatgttcttccttttcattgatgtcagtttatggaccttttggttgttcttctgtttggaccatgttcccctgcttcttcattttccttgactgtctttgttgttatctgttctttataacaaaagccatcatatacttcttcaaagactaggctcatagagatcaccctcaccaatcagcccagacagtaattgtgggtctctcaaaacttgataggattcaaacttctgtctgttcttagtggcccctaggttttagaggatgatagattgtgccaggactcacaggtaagggaggtagaaactatgtactcatgaccatggggtctgtgctgatctgagcttctcttgtcatcactctcaatattcaacttccccgtggatcaggctcagctgtggctgctccacgtggggctgttctcagtctgttgcctctgtgtgtgcagaagtcctctgtgaagttaactagtggagtcagacaggaaaatactacagaccaagaattctcagactgttctgcaaagcccctggattcactgaaaaaagaacaagtttggtccagcaggattcatggcaagtgttggtgagggagataacagtaattcaagtggaagttctcaatgggactcgccttcagtacaaagaagattaacagtcctcagagacactgttcagaagattctcttttaagataataaaactgagagcccaagacaagtctgtgtattactgtgagggacacagtgtggggacatctatgtgagcacagacacaaaagtccctgcagggagacaggaggggactgcatgttagttgctgctcagaaccaccagggggcattcaggacaccagtaggcactcagaaccaccaaggagagctcagaatcaccagggggcactcaggaaactggcaggtgctcagaaccaccaaggggcgctcaagatcccagcgggagctcataaccaccagggggcgctcaggacactagggggctcagaaccactagggggcgcccaggaccaccaggtctctcaagacaggagggcgcactcaggacactagggggcgctcagaaccatcagggggcaatcaggacaccagagggacttcagaaccaccagggggcgctgagaaccaccagggggtgctcaggacatgaccggccctcaggaccaccaggggatgttcagaacaccaggaagcactcaggacaccagagagcgatcagaacaccagggggcactcagatcctccagggggcactcaggacaacagggagctctcaggacaccagggtgagctcagtaaaccagtgttcgctcagaaccaccagggagcactgaggacaccaccgctcccttaggaggcagctccacatcaggtccctggatccgggcagggagggcggttccttttggatcttgccactaaccttttgggagttttcctgcttcctttgtggtttcaagaatcatttgcagattcttctcatgtacaaagctctgctttcttggattatgtaatgtttttggctttggatgctaccagaattacgttgtactgtgagaggattcattcgtggtgtgtgcaatagtgaatgaaagctccaatgttaggggtggctttgaaagctacgttaggggtggctgagggcagttagcagaaaatgatcatcactatagaaggctactcatttctttgcacatttgcataaacaattgtagtttatgccctaaaaactgcatgttttcttggccctttttcttaaatggctccactctaagtccagtaatctaattaagctgtgtttcaaagaccaccaatcaagttaattctgtttaatgcaacactttgtaaagaaaatgtacatctgttttttagagtcagctttaaattttacattactttacaaatattgatttgtcaaatttagtctcataactatcttcagtaatttaaaatcttagtcatgtcatgttaaattaagtaatcctaggtttctcacttgaattagggttactaagaattagaatagtaaaagagtataattagcttttggtgaggtttataaagaaagatgaggatttttttttttttttgcttaaaaatattctgttttccagtttacagggcttttcaactggttttaagataaccactgtttacatctaaacttttttttgtaaatgactgctgagtttctatacatattccatagctagagtttcaaagtaaaagctctagtatctttgtattagtgtgtgtatgcgtagatgtgttaatatgtgcatgtatatatatgtgtgtgtgtgtgtgtgtgtgtgtgtgtgtgtgtgtgttgtggctactaggtacaaaattggctttgaaataaatattttcaaattaagtaaatgagcccaatgcatttgaagtacatgtgacttaaataaatatttaataaataagttggctttaaaattattggtaaaaacaaattagagatattttaacaattatcagcataccttatagtttatattaattcatcaagtgattttatatttaaaatcacagctagatattatatggtgtcaaaattttttatgatgattataaaattattaacctcgttggccatatgcggtggctcacacctgtaatcccagctctttggaaggctgaggtgggtggatcacgaggtgaggagattgagaccatcctggctaacatggtgaaaccccatctctactaaaaatacaaaaagaaaaaaaaaattagctgggcatgctggcaggcgcctgtaatcccagctactctggaggctgaggcaggagaatgcttgaaccccagaggtggagcttgcagtgagctgagatcgcaccactgtactgcagcctggatgacagagcgagactccgtctcaaaaaaaaaaattataaacctcattaaaaccagaatgatctttgtaattttttgacaaatatgatgtttaatattgttgttttaataaaaaacaggtaaatagttattagaaaaacaattatttgcttaattataaggtttttactcaggcaagcacctgaaattcatgggttataacatggttaacagagaaaaaactttaaaggatgaattacaattttcataagtaatctagataagctacttaaataaaatagggaaatgtaatcaaataaaccttttaaataaacttgttctacaatttaaaaatctaaagtttaattaaataatagatattgactaaatgtttaggtcattactaattgttttaaaaaatatataagaaaatatttttcttaaaaaattattcttagaaaaataatgtaattcaaagttatttatataacatcataaaaagtaagagagttttaaagaaatttattgacatagagaagtacttttggtaagaaaggttaaaataaaaaaattttatatgagaaataatcttgcatggtaattttttatcctaaaataaaatgactaagaaagaatgacgtttagaataaaacaagatgttcaactatgccataaatggtttgtgtaagtgaaaataagatttataaaaagttaatttattaaaaaaccttcatattatcaagttgactataattgaaagggaagtatttataatagtctttatagagatctggcttttatataaaatatagtaatacactgaagactggttagaatgacaaaattgtcttaaagtgttgatttactaaataaaattataagatattttaattttttaacccccaaatttaacttttattgcatcttgccattttgattttttccctttgagaagacttgagaggctctccattttttcatcacgtcctttaacattttttttcttacagcgattagcttcttactgacttaacttctaactgttgttagcttttaactgctattattgtctgatgctaaaaacattttatctttaagttctaaataaaatgttttctttcaatataacattctacactcttggcttatctttaaatgtctacatttttctatgaaaccaaagtcttcacgtgtaatctgagtcacattcttggtatgtctaattaattcaaatgcttttttcattagagttgacctgcaggttatctacatgcattttccaatagggaaaagcaatcacactgtaaaaggttttgctttgctatttggtaactggcataaaacaaattttatattttattgaaataattcctatgttactgttattaaggtttccaacttactgagattttaagaaaatataaattaatgttattacattcatgtagctatctacattacttttaaaggccttgtgctgccacattactgacctttgactcctaggtctaaaaaggacacacagcattttgggagactaaggcaggcagatcacctgaggtcaggagtttgagaccagcctggccaacatggcgaaaccctgtctttataagaaatacaaaaattacccaggcatggtggtggatgcctgtaatcccagctacttggaagcctgaggcagggagaattgcttgaacctgggagacagagattgcagtgagccaagattgtgccactgaactccagcctgggtgatagagcaatattccatctcagaaaaaatatataaataagagaaaaaggacactaagtcctgctaaatcttaaacactgacagtaattaaagccccatctacagacctggaagaaaatgacaataaaaattcatcatactcttaagacataaggccagaaattgaaactactcaacaactccaggcccagggactattacagaagtggatttgtaagattgtaaaagctaattttgagatataatattacttgagagtttctttataagttaagcattaatattaaatgcacactaatggaagtctagcatctgggcccctgtgacagattgacaagggtttcttgaagaagtaatccactctttagcttaaaaaattattaaaatttataaaagacctatgaaaattatattttatggtaaaagtagttataatttaatagacttatttctcagaattgagagatagttttaatttttctcatgatgttcttataaggggttattgtttagaaaattaattctttcaaaaataaaagtttttgcttttttaagaaatcactgagttttcacttggctaaataaataacttactttacaataatctgtaattccattttgtaatatcaagtgttctaaataaacctttgatatttgacctccttcacaaaataaaagtctaaattcagtcatttgacctcattattcttttttgatatttgatctcctgaagccaaaaagaaacatatttagcttctttggtacaattaaattatactggaagcaatgtcaaatttgaaatggtgtttaactttggactatatttatataaatgtggactatataattggagtatattcatataaattaaagagtacatgttctaaaatggtatgaggttcaattgactttgatatgtcagtatattttgtcagtagtacttatgattattatataaaatttttgttcatcacagaaataaccaaactttctcctcaattctgtctttaaccgtggctattctaaaacttcagccatccacaattgttttcctttgattctttatcaggtggcttataataatctatagaattttgaggggtactcttaaatacacaattgtgacaattttataaattgtgccatttatatacagagaaaaacttccaagactctcatggagacctgatgcatttatgatggttgttaatataatgtcaaacaggacaggacttaattgcatgaactgaactaacaggagcctgaaataaattttatggcttattctttaaagcatttgctaattacttacattttgtttttcagaatcaaaaaaaaaattctcttaagctattcattgtttttaacaattgagtatagtatattctagtgagaaaattcaaaaacacaatttcttcttctctacataatttctccaaaatttggaaactgtgagtattgttatatcaaaatattaattcacataggttcaatataaatctgctttcttccgtaacagggcacaattggagacaatgatcattttaccaagactttaacttgaatgacatattttcatatttactttataaaatgaatttaagctggatagctgataaaagccccttgggaaaactggcatgtaacctgttttgttcagggccctgagctgtagtaagtcaataattttactttctgacagacccaggaatcccaagttgtcttggaaaattgaaaaaagaagaagtaacccaattcatatagctgtctgaaggcacagatgaaacaatgtctgggcttgatgcttttaaagattctacccttagatttcttataaaaaatttccagcaaggtcaatttatgaattaaatagcctatgtacaaaaaatagaaaaaaagagagctaatatgttaaattactatttttgcctcatcttatacaaaaaaattaagcctaaaacttatattacaaataaatttgccctactatgattgtgtctctaataactttggggaattatagagagaaatactgtttcaaaataaacaacagtgcatctgttattagattctaaccttgtccacttgtttttcaatttatattattttctacaatttatattagtttctacaatttatattagtttctataaaaatttatatttgcagaagcctccaaaatatttttcctgatttaaaattaccagaagttaaactgtgctttcttatagctagacatcttatactctaaagaaaataaaatcaatgacatgatttggctctgtgtccccaccccaatctcatcttggattgtaataattcccacatgtcaagtggaaaaaggtgggaataattgaatcatggaggctgttttctccatgctgttctcctgttattctcacaagatctgatggttgtataaggggcctccctcttcccttggcacttctctcttgcagccatgtgaagaagcacgtgtttgctaccccttccatcatgattgtaaatttcttgtggctttctcagccacgcagaactgtaagacaattaaaccttttttctttataatttacccagcctcaggtatgtccttatagcagcatgaaaacggacaaatgtaagcaacttaattatatacaaaaactcttttatacctgcctactgtgaaaggaaaataagtcttgagaccgcaaaatcaccaagctaaatggaagagtcaaactggtgttacaggagatagaaagaaattattttggtagatagttaggatgacagaatttctgccgaaaacatttcttctaacaaaaatcagcttggcaattacttattttctattcacacagagttcaaagaaatcacttctaacaaaaagcagcctgaaagatcaggctgtaaaacatataagcaactctgccacagagagggtgtttctgggtgtaatcaccaaacttcacatacatacactgggccctagtaaaaacagtgggccttaatgagcacattcctttccttttctgggggcactataacatcagaaagctggaaacttgcacaagtttaggatgcctgcacttgcaaggaggtacctgggacctagcatggaaaatcctcttcccctttttagcactctgggagtggagccccagccttgggattcccaggtgtttcccttcagtgatcaggactgaacacacacaactcatcatgcagtttgtgctgagctgggttttccttgttggtattttaaaaggtgattcatggagaactacagatgttgagtgtgagtggacatgagtgagcaaaacagtgggtttgtgtggcagtttctgaccttggtgtctctgtgtttgcaggtgtccagtgtgaggtgcagctggtggagtctgggggaggcttggtacagcctagggggtccctgagactctcctgtgcagcctctggattcaccgtcagtagcaatgagatgagctggatccgccaggctccagggaaggggctggagtgggtctcatccattagtggtggtagcacatactacgcagactccaggaagggcagattcaccatctccagagacaattccaagaacacgctgtatcttcaaatgaacaacctgagagctgagggcacggccgtgtattactgtgccagatatacacagaggggaagtcattgtgcgcccagacacaaacctccctgcaggaacgctggggggaaatcagcggcagggggcgctcaggagccactgatcagagtcagtcccggaggcaggtgcagatggaggctgatttcctgtcaggatgtgggacttcatcttcttccaacagtttctctaatgaacctccctaattttagaattctgtggttcctaatgtcatctctacatattttcaaaagatcattttaatatgaggacataacctctcatgtaccaaatgcacattgatgcttacaaagatgaaaagttctcaaccattgtcaccaggatcgcagtcctgaggaagctcacgggtgtctgatgagtctcctccattcaggcccaggacagaaacctcagggagactcctggactagaacggcagggattctgatcacagccaatagagagcctgggccagggtcagtgtcctgtagaagctcacagggttcacatctgacccttctcctgaccctaaagccaatccgcatcagcactgatctggtgctccttttgctcccaatacatgttctttctttggagtgtttgttctcccttttttatttgcttttctttcttcctgaaaaagaaacacatggtctctatgctctacactccagggctcaaggcattttcttagaactcaggcaaggctcaggcttggctactccagcccacgtgggagaggctgatgggatttccttctctccccatattctcagggccctcctctgtgttgtgtgtagactcatctgggaatgcaattggccgttaatagtgaaggggataaactcatttgatcaaaatgggatgtggatgtggaattaaccctgttctatgcacactgtcagagtcatcttcttcagaagtagtgttagaaagagcttgtgaactttatcagaatcaaaatggatccacttgtgttaaaaccctaatgaatgaagctggggaaggccatgaaggagggttctaacacacatattcctgataagaagaactatcataaatagaccctgcacagccacaaccttttacacagaggccaccacagccttaaaagctttatttctccaagtaaatctgccccgcaactgcctattcaaccttacaccgctatctcaaaatagctgctgtcaccctcctcatttttccttaattctcttttttattattttttaaattatactttaagttctagggtacatgtgcacaaagtgcaggtttgttacatatgtatacatgtgccatgttggtttgctgcccccattaactcatcatttacattaggtatttctcctaatgctgtccatcccccttcccccaaccccactacaggccccggtgtgtgatgtttcccaccctgtgtccacatgttctccttaattctttatcttccttttcctacctgaatgtacccatacatattttaattgaaacgcacatcctagaaaaaatattattatactttagagtctctgtctgttattcaggttgacatgacaagctacagacggacatgccacttttctgtgagacatagaggatgacagtttttggagatgtctaggaatatccaatgtccataagatcagccatcaataagtgcagactggaggtcccagagagaggcgaagctgctgaatcatcgtggaatttcattttctccagttctgctctgatggaatcaggcccacccattttatcaatgacaatctacctaacctagagtcagctgatgacagtattaatatcatctattaagtaaagtcataactatatatatagtgagagagggagagagagagagacggagtctcgctctgtcacccagggtggagtgcaatgtcgtgatcttggctcactgcaacctctgtctccggagttcgagcagttctcctgtctcagcctcctcccagtatctgggaatacaggcacacaccaccatgtccggccaatttttgtatttttagtagagatggtgtttcaccacattggtcaggctggtctcaaactactgacctcaggtgacccacctgccttagcctcccaaagtgctgggattacaggggcaggccaccaagtccagctaatttttgtatttttagtagagaccaggtttcacgatattggtcaggctggtctcaaactcctgatctcagcctcccaaagtgctgggattaaagatgtgagctactgtgcccggccaacaccacctatattaatgttggattgaataactacaaagtctaccctaaccaagtgtaccatcaaacttaccattacccagaggaaagaatctttaacatgagatctatattcttaaatgttttaaggtgtaaaactgaccacagtacaatcacccaattatgattttgctaatgagttgtagaaactgcatgtatattttggatattaacactttttcagatgcacaccttataattatattctctcattctgtaggttgcaattttttccacactttgcggcatctttttgttgtgatgtagttctgcttgttcaattctgcttttattatctgtgactttaatttgaaatatagaaaatcatccttttttatatactttaaattttagagtacatgtgcacaacatgcaggtttgttacatatgtatacatgtgccatgttggtgtgctgcacccagtaacttgtcatttaacactaggtatatctcctaatgctatccctctcccctccccccaacccacaacaggccccggtgtgtgatgttccacttactgtgtccatgtgttctcattgttcaattcccacctatgagtgagaacatgcggtgtttggttttttgtccttgtgatagacttctgagaatgatgatttccagcttcatccatgtccctacaaagggcatgatctcatcattttttatggctgcatagtattccatggtgtatatgtgccacattttcctaatccagtctatcattgttggacatttgggttggttccaagtctttgctattgtgaatagtgccgcaataaacatacgtgtgcatgtgtctttacagcagcatgatttataatcctttgggtatatacccagtaatgggatggctgggtcaaatggtatttctagttctagatccctgaggaatcgccacactgccttccacaatagttgaactagtttacagtcccaccaacagtgtaaaactgttcctatttctccacatcctctccagcacctgttgtttcctgactttttaatgattgccattctaactggtgtgagatggtatctcattgttgttttgatttgcatttctctgatgaccagtgatgatgagcattttttcacgtgtcttttggctgcataaatgtcttcttttgagaagtgcctgttcatatccttcgcccactttttgatggggttgtttgcttttttcttgtaaatttgtttgagttcattgtagattctggacattagccctttgtcagatgagtagattgcaaaaattttgtcctattctgtaggttgcctgttcactctgatggtagtttcttttgctgtgcagaagctctttggttcaacatactcaaatcaataaacaaaatccagcatataaacagaaccaatgacaaaaatcatatgattatctcaatagatgcagaaaaggcctttgacaaaattcaacaaccttcatgctaaaaactctcaaaaaattaggtattgatgggacgtatcttaaaataataagagctatctatgacaaacccacagccaatatcatactgaatggacaaaaactggaagcattccctttgaaaactggcacaagaaagggttgccctctctcaccactcctattcaacatagtgttggaagttctggccagggcaatgagacagtagaaggaaataaagggtattcaattaggaaaagaagaagtcatattgtccctgtttgcagatgacatgattttatatctagaaaaccccattgtctcagcccaaaatctccttaagctgataggcaacttcagcatagtctcaggatacaaaatcaatgtgcaaaaatcacaagcattcttacacaccaatcacagacaaacagccaaatcatgagtgaactcccattcacaagtgcttcaaagagaataaaatacctaggaatccaacttacaagggatgtgaaggacctcttcaaggagaactacaaaccactgctcaatgaaataaaagaggataaaaacaaatggaagaatattccatgctcatgggtaggaagaatcaatatcgtgaaaatggccatactgcccaaggtaatttatagattcaatgccatccccatcaagctaccaatgactttcttcacagaattggaaaaacctactttaaagttcatatggaatcaaaaagagcccgtattgccaagtcaatcctaagccaaaagaacaaagctggaggcatcacgctacctgatttcaaactataccacaacgctacagtaaccaaaacagcatggtaccggtaccaaaacagagatatagaccaatgaaacagaacagagccctcagaaataatgccgcctatctacaaccatatgatctttgacaaacctgacaaaaacaataaatggggaaaggattccctatttaataaatggtgctgggaaaactggctagccatatgtagaaagctgaaactggatcccttccttacaccttatacaaaaattaattcaagatggattaaagacttacgtgttagacctaaaaccataaaaaccctagaagaaaacctaggcaataccattcaggacataggcatgggcaaggacttcatgtctaaaacacgaaaatcaagggcaacaaaagcccaaattgacaaatgcgatctaatatgaaattcttaatgagttctatagttataagtacattatttctccttattaaaactaatcttttttgctgaatgggtggaagatggtggcttccctccaaaagaaaacatagttggttctgtaaagagttcacccatttcttccactataggcctgccctggcataatacaagctcccaacttaagaacttatgattttccatccatgggagaagccatcttttccatctattataaaaacagaagacacttcattaatatcactcccaaaataggctatgtcatatccagtgaggtaggatggctgacagtggtgagaatccaagtaattggtcaagcactgctatgtgtgaagaaacaccacagcatactctacactgtcactcatgatatggaattgttgcctcctcagcaatgtaactgagcccttaatatgtggctgggatgacaaagcaatgccagcctgcagagtggaacctgttcttccttctgggattagccaaaggccggtggcactcatggctgaccctactttccttacaactggacgaagcgaagcaactggatatgaacttctatcccaggatgtaactgtccaaagtgccttctctttatgtcaactggaaaagtgtgaaagacagacactattctcataaacggatatcctagttattccacccactagccagctcttccccccaggtggcagtcatagatttagaattgcaagtagaggccctggctaagcataccaccagtccctttaacaacacctaccataccatcatcattcttactgaagaaacctcacagatttgacaagtgacactatgaagctatatgaccctaggtattgcaactacagccaaaggtaacacttgtgtattaatgaaccctgaatgttgcatatatatacaagattagtcccacaatataactcaagctatgcaagcattagatacccatatttctgctagagatggatgccctctctcaggaccctgcgacagcatggtttagttgacttcctaacacatggaagactttcatatatagtagagctggtatactcttcattgctatcttcagttgctgtggattttattggtaccttgcactttaagtgagaatgtaatactgaccttctcaaaaactcctaggtccttgcaccataatgctccaacaaacacctactgtaattccggagactccagaatatttccaactccagtttaatggattcccttccaatatatacaagctatgccctttctaagaagtagccagattgactatgacacacgttttccatagaaacaaaatggaatttgacagtggggaatgatatacaggcagcttaatttcaaaatgcattttaaacttattttttgaggttttaatattattttcatactccttgaaacctgaaatttcacacttacattctaattgagacttaataacaaataaccagaacacatgaattgcctgtaatctctataccttgtattgtaagccacatttcaagtgtaaccttacttgtcagcacagtatgtttaccataggcataattgcttgtcctgactgtccagaaggcagggtggtattaagtatgcggcctctggagctgggaagtctggctttgtatactgtctctgccactgctaactgaaggacaatgggccagttacttcctgtaccccagttttgtcatatgtaaagtagggttgttgtaagaatgaaattagttaatatttagtacctaacaactagtaggcattacgtggtagctattcgtattgctatcgtcagagaacacacaggagtccattgttatttttaccctccccctccaaacaaaatgtgtaagacactagacatggtagctctgtaacggggttcgtcatgtattaaactgtgtacccaaatgatatgtcaaagtcctgacaaccagcacttcagaacacgtccttatttggaaatatggtagctggagatgttattagtgaagatgaggtcttacttgagcagggcaggccctcaatgtgggaagatgggtgtctttctaagtacaaggaaatttggacacagagacagagacatacagtgtgccatatgacagcagaggcaaagatcagagtggtgcagcagtaaaccaatgcatgtccaggattaccagtcacctccacaagtgaggaaagggcaaggaagaagtctcctgagtctcagagggagtgcagcccagctcacacttgattttggacttctagtctctagaactgtgagacaatacagtcctgtcatttttaagccacccagtttgtagtatttcattttggcagccctacgatattcatacagagttcttcacccaaaaggaagcactctttctcacaaacagtcaaagtcctggatgacggacaacctggagattgcaaacctccaaggaatcaaaggaggttctataaagtctaggagccccatctttcaaaggctgctcctcaagtccacacacacactttggaaggagaatcctgctcttggacatgggatccttagtgagccaactgccaataatccaacatcatcatgaattaaagatctctgacatttcctcgtcaccaacgggaattctgtcaagtagtaagtaaaacccttcttcaggaatctccacaccaaacagttctgcatggcttgggacgcctcaggaaacttataatcatggcagaagaaaaaggggaagcaaggcagtcatacatggtggcagaagagagaggttaaacttttcagtctctcttgggtgtaaagatacaatcttgaggcaaacagcagaatcaattttcttatgccttgaaattctccctttcaccataaatattcccttcacattaatctaactttatgtttgcatcgaactatgtgcctttttggaagttccggaagctaatttgagacagatagacaaagtcgggagaccctgatgcagaattccagaggtgacttcaatgttgctagttaacaacccaggcattgcccagatgatgccagcccaagatccaggtggactgggatgccagagagctgccagaacaagacgcacagacctggttctcagcccaaatcttgcatgcctttcttaccaactttcccttttttaaacccctgcctttccttcaaaattgaagtggttgcttgggatgggaatgcgttcacttcccctttaccattatggttaatacaataatttttgtaccagatctctctcttgttaattggatcctgcaggtggcagattccggaccagagtgacgttagaaactgaatgcacatactgggtggttcacagacacagtgttctgtgaagtttatgggtggattcctggggaagcctgcaagcctgttagtgattagcagaaccgcatccagctactgggatctgcacgccaggtgccgtgagcccctcaccatgttccctggtcccagctgcccgcggatggttcagccttgacaacgggctcggtgttctgggtggtgggagagcaagggggccccttgggcagcgtgctacagggctgtgaatccaggggcccacccggtgttccctgtggagtcactgagggaatgaggggcttctcagggcacagagctgtaacgcctttgtgcagtggtggctgaatacagtgacactgggcgcgtggtgagaagcggggcaaggtcagttcactggaccctccgccctgagcctcagatgagtcgggggtccccagacaggcccggcctctgccctgcggcggacactggagcctttgctgtggccgccaccgaggagccttgacctcaaaggagggggaacctctctacccacctcggaaacctgaagggagcggcggtctctcccagacaggatctcgccggcctccgcgtctccaggcccaaccctgtaccacataaaggaagtccgcgctgagctaccgggacacagcgccgttgggtgggcgggcgcggcgcggcgggaagcaccggggcagctgccacagagatgcgcggggactgtcgggaagtgggcggtccgggaggcgcggggctgatgggacgtgggcggtccggggacgcgcgggggatggcgggacgtcggcgatcccgagatgccagggggcagctgggacgtgggcggtctggagaggcgcgggggcagctgagatgcaggtggtccgggacgcgcgggggctggcgggttgtgggaggtccagggatgcgagggggcagctgggacgtgggagttccggggacgcgtggggtcgccaggaagcggggtctaggacttagatccgccttctcttcaggccatgcagccccgaagctccgaatcctgggatgactcctgtccatgttggaagggaccctgccagtcctggcaaggttcaacggccttagggcaagaaatgttagtagagtcctggaagacgatgtggggaacgggtagcggccaccggatggtgatcgttcttctacaagaccttgacatggatggggagaaacagagaagaaccttccaagtttgtcccactggacatgcccaccacactttaccagccctttctagaaggcctgtgcgtaacacatgaaaaagctgctctcgacctttccctgaccttttaaaagaaaacatttgctgcatctaatccgcctagatgtaaggaggttcccaaatgtatgacagagtcagacaattacatgtcttgtaagttaccatgtgcttgtcttttgttttccgttttttttcgtttttttgttttttgtttttgagacggagtctcactctgtcgcccaggctggagtgcagtggcaggatcttggctcactgcaacctctgcttcctgagtttcaacaattgtgctgcctcagcctcccgagtagcttggattacaagtgtgcaccaccacgcctggctaatttttgtagtttttagtagagatggggttttgccacgttggccaggctggtcttgaactcctgacctcaggtgagccacccaccttggcctctcaaagtgctgggattacaggtgtgagccaccgtgcctggccgtaagttaccgtgtgctttttaaacaaatcatagcaaaggggtgtcttctggaaatgacattttgaaatggagttactagaccacccctggaagggacacagtaaccacacgtccacgttcgttcagtgggtgagaggacatggaggggagacctgggcaggaagggaagagggttccatgccaggctgctcatatttaaaagacattttcattgtagggacatggatgaaattggaaaccatcattctcagtaaactatcgcaagaacaaaaaaccaaacaccgcatattctcactcataggtgggaattgaacaatgagatgacatggacacaggaaggggaatatcacactctggggactgtggtggggtggggggaggggggagggatagcattgggagatatacctaatgctagacgatgcgttagtgggtgcagcacaccagcatggcacatgtatacatatgtaactaacctgcacaatgtgcacatgtaccctaaaacttaaagtataattaaaaaaaaaaaagaaaaataaaagacattttcatatcgttgtcattgttttcttgtgtgcattttattcctcgctattgtatacatcattggaaattctaagtattcttttgaaatatctagtctttctagatgttctgaagtgcctgatgtatgttaaaattacaggtggtaaaataataaattttgtaaatgtctttttgttaaaattcatatgcagtgttttattttattttgatgttggtggggggtggggaggatggccaaatccctgcttgatcaacacacattgcgtttgtgctctggttcaggggaggagagaggaggagaaagtgcagacttccaggcctctgtgcgcaccgggaggagagattaatgatcatctcttctgtctgtgtgtttgttttatttatctatggatatcctgtgtataaaggatgaacaagtcctatttataacatctaatcttttcaggtgttaagttgccagcgtatgacggaagtagcattattaaacgaatgcagcttgtacatattgtgttaaaattcataaaaagccagtcttctgaaaagaacccttgggccctccctccgcagcctccggcgccagctgcaggaagacctggccaggggaaggcgggcggcagaagctgctgctggctgtggggaaggcggtggagcccaggcctccacaggctccccacaggctccccacaggctcgcgcggctctggttgctgggctccgcacgggccgcgtgggggcgcctgctgggagcgaggaggcgccatcctggctcgcctgctccaggaggacgctctgggcctgcgcagatgcagttctccaggatgggcgcgggcgctgggggcggcgctccttgggctgctgcgcctccactgagccgcctgggtgtgaggacctcgcgccggcgcctccgggaaggacgcggagccgccgcggccgatcccagggctgcagctgctgcccgacgcccgcgggaaggcccttccgccaccgcccgggggttcgaacttggagcagctgctgccagctgaggcgccagcggcgtcgggagctcctcagagtcagtgttttgtgctggattcggcatgtcctctgaaaactcgggaatttgtcactgaaatggtgacaggaggtgagaagtttttttagacgttgccttcgctggcctggcgcggggctcaggcctggaatcccagcactttgggaggctgaggcgggcggatcgcttgagctccggaggtggagaagctgccttcgtggtaactgtggtcttaagttcagctgagaacgataaatggcttttccttgaattggctgcttttgtgatttctctcaggctcatcttttgtcagttaaaaatccagtggtaggtgtagcttagagacgggaaatttttggttttgttttggctacacgtaagtgttggaaattattttcttttacgttccagtgtgagcaaatccagaaggatgtcagattaaacaccgaatttaacaaattcagccgggcacggtggctcacgcctgtaatcccagcactttgagaggccgaggcgggtggatgatgaggtcaggagtttgagaacagcctgaccaacatagtgaaactccgtctctactaaaaatacaaaaattagccgggcgtggttgtgcgcgcctgtaatcccagctactcaggaggctgaggcaggagaatcgccgagattgcgccactgcactcagcctgggcgacagagcgagacttcgtctcaaaaaaacaaaaaaaaatcaatcattggaatactgttgttcattacaattaatgaacgtttgatagacgcataaacgaactaaattcacaagtacatataagtaaaataagccaaaaaaaaaaaactacatcccgtatgatgacacttttatacattctacagaatagaaactaaagtgatatgaaggttgggagttgaatggagaaaaggtgagcgaaaagagggaggacggaggagttgcaagagaacaagagaaaatgttgagggtaattgatctgttttctatcttaataatggttatggttacatcaataatttctaaattgtacattttgtgtgttaattataattttatattattcaagctattacaaataaatacctgtataaatttcttagggacggtttaagggagatggataaatcacataaaaagtcagatatttctgaatgtacaatgaataacccttagctctatctttattttttggtaattctaaaatgcagcagatttttttaatgtttttattacaagaagggtttcttcaaaccacaccaggtgtgtgtaactctgggctaaagttggttaagggagcagtgggatccggtggagaggagcacaggcctcgatcctggagcccattcttgtcacatgtgagctcctggacacatctcatagctccctcatgcttctgcgtttacattctcatctgtaaatggaggaccaatgggcatctgcctctaacaatgtattttcatgtgttaagatgatgtatgttaagtgtttactatagcacaatcttttaataagaaattacatttttttccaaatactatcattgtcttcaagccccaccacccaccagaaaacttaatatgctctgtgccctgccctgtcctcagacatccagcccaagagacttttatatagtaggagatatgcaaatagttccctccctctgctgatgatgaaaaccagcccagccgtgaccgtgcagctctgggagacgagctcaagtgccaggattcccaagtgttttcacttggtgatcagaacttaacacagaggaatcaccatgttgtttgggctgagctgggctttcctttttactattttaagaggtgatacatgaagaactacagatattgttcgtgagtggatattagagaaacagtggatatgtgtggcagtttctgaccaggatgtctctgtgtttgcaggtgtgcagtatgaggtgcagctggtagagtctgggggagacttggtacagctgtggtggggttgggggtgtcctgagactctcatgtgcagcctgcggattcatcttgagaagcaatgacatgaactgggcccaccgggcttcaagaaaggggctggaatgggtctcatacattagtgctagtggtggtagcctatactatgcagacactgaagggtagattcaccatctctagagacaatggcaagaacatgctgtacttgcaaatgaacagtctgagagatgaggactcggctgtgtgagagacatggtgaggggaaatcagtatgagcccagccagaaacctccctgcaggaaccctggggtggggggaaatcagctgcagggggcactcaggacccactgatcagaatcaaccccagaaggaggtgcacatggagattaggggctggattccttccaggatgtgggacttcaacttcttctgacagtttccccagggaaccgctctaagtttagaattctgtgtcatctctatgtatttaaaaaagatcattttaatgtgaggaactaactattctcacatgcacaaaatgcagattcacactcacagagatgaaaagtcctcaactgtggtcactaggatcagagtcctgaggaatctcaggcgttcctggtgagtcttctccaatcagacccaggacagacacctcagtgagattccatgactagaacaggctttatggattttaaaaaaaatagactgagccagggtcagtgtcatgtagaacctcacaggtttcacatctgacccttctcctgacactaaagtgtgcaaatcagcatcaatactgatctggtgctgcttttgctcccaatctgtgttctttcttgagttgtccctttttcatttgcttttcctgctccctgaaaaaagaaagatgttgtctctgtggtctaaattccagggctcaagcccttttcttggagctcaggtgggtctcaggttgtggctcctgcagccacgctggggaggctgatgggactttcttctctcccattgctcagggccctccactatattgtgtggagactcatctcagaatagatgtggccagtgggagctgaaggggacaagcttgtttggtcaaaatgagatacaaatatggaattcaccctgtgctgtacaaactgtcacagagtcactttctgaaacaatagtgttagaaagaacttgagaaagttgtcagaatcaaaattgggtcacttgtgttaaaactctgctgaatgaagctgggaaaggccgtgacggaatgttctcatgctcatatccctgataccaagaactatcgtaaatagactcttaaaaccacaatcttgcacaaaggtgcccacaaccttaaaagaattacttctctgagtaatcttcccagcagctctctgtgtaagattggactgatgccacccttgttattgattcttctatcccggagaagttgtctcaaaacagcttatgtaaccctcctcatttttctttaaacctttatctttctttacctgcctgagtgaacccatgcatgttcccattgcaatgtccatcttcaaataattatcattttactttagagtctctttttgtctgttattcagatttgacaagctgcagatggacacatcacgtttctgtaagacttaggggatgacagttttgaggcatggctggggaagtacaatgtccataagattgaccctcaataagtgcaggctgtaagtctcagagctgaagctgctgaatcaccatagaatttcatctttagttctgctctgatggaatcaggcccacctgtgtaatgaatgacactctacctaacctagagtcaactgatgacaggttaaatatctagacagcaaatttgcaacaccacttagattagtgtttgaataactacaaagtatagccgagccaagtatatcgtaaagcagactattatacatggagaatctttaacatgacatctacaattcttaattttttttacgtataaaactgatggttttacaatcaggctgtcatgattttgctaatgagttgtagaagttacatgtatgttttaaatattaacagttttttcagatgcctggtttgcaactatattctcccattctgtagatttggaattttttccatgctttgcaaaatctttatattttgatgtagttccagtccttcaattctgcttttgttgtctgtgcttttaatcttaaatttaggaaatcattgctaaccttttggtgggagagaattttacaattgcaggctatacatttaactgtttaacccatctagagttgattttttgtgtttattctaacctaatattcttaactatttgcaagtgaaaacccagtttgtttaacaccctctttaggggagagtatgatttagccgttgtgtagaaaatgttataaatcactttgccttcatattggttctcaacttgaaaatgagtttgccatcaatacgtgggtttatttctgagctctctatatgtatttatgccagtaccatcctgttttgattatgtttgtaattaattttgaagtctgagagtaaaatgcctccaagtttattcttgcccttttgcagatattagacaaaatattttaacatttcaccatgaagtatgataacagctatggcttttcataatgaattttattgtgtttaggttattttcttgtatttctattttgggtagagtttttatggtgaaaccttgaatttttttaatgttattttctgtctgagaagttaatgggaccttcttcgtatttaatttggcataccaaatgtattgatttgaggattttgaatcatctgtgcatctcaaaaataaatttgagttggtcatggtgtatgatccttctaaagtcctgtggaacttagttgactattatttggtgtgtggagggggctcatttatgtctactaggaatattggtctgtagtttacttttttgtgaccttgtctattactgaaaatacggtaatttgggccttatagaaagactggaaggttggcatctcaccaatttttgaaaaagttagagaatggttggcattacttctttaaatgttgagagtcctttttttacttaacatgtgacctatcatggagaatatttagtctttgcttcggaagcatacatattacactgctcttggttggaaggttctgtagatgtctattaggtcaatttgttcaatagtgttgttcaagtccactgtcttcttaagaattctcttaatgatgttctatccatcattgaaagtgaggtgctaaagtcttctcctaatttttattattttctatttatctctccatatctcttaaggtttgcttaatgcagttatatttatttttgtacaaatatgtaaaaaataaatgaaataataattgctaagtaattttaatggcaaaatcacataataagaaattatattttcccaaatgctgtcattgacactaagctcctccaggaatctcacatctgctctggacacggctctcctggtgtcctaccccagagcttgctatagaggaggagacatgcaaatagggccctcactgtcctgatgaaaaccagccttgcctgcgtctacgggagaagagccccagtccagaagtaccaggggtttccatttggtggtcaggtctctgaacacagaggactcactatggagtttgggctgagctgggttttccttgttgctaatgtaaaaggtgactcatggagaactagagatattgagtgtgagtggacacaagtgagagaaacagtggatatgtgtggcaggttctgaccagggtgtctgtgtgtgtttgcaggtgtccagtgtgaggtgcagctggtggagtctttgggaggcttgttatagcctgggggtccctgagactttcttttgcagcctctggattcacctttagtacctttattaggtactggatgagctgggtccatcaggctcctgggaaagggctggagtaggtctcatttatgagttgttgtgtaggtagcacaagctatgcagactctgtgaagggtcgattcaccctctccagagatgatgccaagaaatcactgtatctgcaaatgaacagcgtcagagccgaggataggtctgtgtattactgtggtggcattgtgtgcatcccttgtttaggtacatgcagagatgctgctttggtgtgttcaggggctcctgttttggggacaccaattttggagtttgcagtatccttgagtccagtacgttcatggtggcattgggtctggggtgtgcagtggcaatgagtccaggatacatgcagctgatgccgtatcttgtgaggacaagaacaactacaaaacgatcctattaataaataggcaaatgacttgaatacacatttttcaaaaaatacatacaaatgacatatagatatataaaatgttaaatatgagtaataatttttaaaattcaaatgtaatctacaataaattatcaccccatacctgttagaatagctatttttaaagaagatgaaagataaccagtattggggcagaagtggagtaaagggagcctatatatattgttactgaaaatgtcaattagtacagacattatggagaatactatggaggttcctcaaaaaataaaaatagaactaccatagtttccaacaagcccactactggctatgtatccacaggaagtgcaatcagtatgtcaaagagacatctgtgcccccacgttcattgcaggaatatttatgatagtaatgatgtgggaacatcctaaattaccataaatggatgaattactaaagaaaatgtagtatgtacccaatggagtaatgttcatcctaaaataagaagggaatcctgcatttgcaacagcaggcatgactctagaggaccatatgtgaagttccacaggcaggcgcagaagacgagtaattcgcgatttcactgtagtttgtttaaatggtagactcacagaagtagagtggagtgttggttaccaggggctggaggggtggactggaaaaggcgagattttggtcaaagggtgaaatgttccagttagacagaaggagaaagttacagtgttctaatgcacaagatggaaaatatggctaataatgcattatatatttcaaaatggctaaaaatgcaaatgttaaaaattttctcactaagaaatgatacagcctgggcgcggtggctcacacctgtaatcccggcactttgggaggctgaggcgggcgaatcacaaggtttggagttcaagaccagcctggccagatggcaaaaccccgtctccactaaaaacacaaaaaatagccaggtgtggtggcacgcggttgtaatgccagctactcgggaggctgatgcaggagaattgcttgaacccgggagacagaggttgcagtgagctgagatcatgccactgcactccagcctgggtgacagtgagactccaactcaaaaaaaaaaaaaaagaatgaaatgatagctgtgtgaggtgatggatatgtcaaatagcttgattaacaattccataatatatacatgtatcatagcatgtgtgaggtgacctgtatgaaggtgaagtgacctgggggctgtgtaagattacctgggggtatgtgtgaggtgaacacggcacatatgaggtgaccagagacacatgtgaggggacatgggagatatgtcgggtaagccagggggatttgtgaggtgacacagagcaagtgtgaggtgacgtggatgcatgtaaggtgatttggggcacatgtgaggtgacgtgggggatatgtgtgagctgacctcgggtgagtgtgaggtgatccaggatggatgtgaggtgacctgggggtgtgtgtgaggtgacttgggcacatgtcaggtgacatcggggattggtggtgatgtgggtgtgtgtgaggtgacctaaggaggtatgaggtcacctggggcatctgtggggacctggaaatgtgtgaggtgggtacaggtgaagtcacctagggcacatgtgaggtgacctgtggaatgtgtatggtgacctgggaccgtttgaggtgacatggggaatgcgtgaggtgacctggggcatgtgtgaggtgacaaagggcatgtgtgcagtgacctgggtgcatgtgaggtgacctggtgcatgtgttaggttacctgggggatgtgtgaggtgaacaggggcaggtgtgaagtgcctgaggaatgtgtgaggtgaactggtgcatgtatgtggtgacctgggggatttacgaggtgacctgcgggatgtgtgaggtgaccttgggtgagcgtgaggtgacctgacgtatgtatgaggtgaccagggtgtgtctgaggtgatgtggggtatatgtgcggtgacctggtggatgtgtgaggtgacctgcaggatgtgtaaggtgacactggggatgtgtgaggtgactcagggcacatgtgaggtgaaattggggatgcgtgaggtgattcagggcatatgtgaggtgaccttggggatgtgtgaggtcaccttgggtgagtgtgtggtcatctgggatatttcccaacttcgtaaggaaagcctgcaacaacacatggcattagaagcttcacactctagcaccattaatgcgtacatcctcaaggaactctaaatgttttgaggttagcttaaatgccatggagcggcaccttccccaggcacactcatatatgcatcctgggtctccctgccaagctatatctcctcaaatttacagtttatgtttgctctgtgacatcaactctgatatgttcaagtgtgtttttttttctttatttgtagttgttcaggcttgttgtttcactctcattactctgggctcagtcctctcctcaggtgtcccacttcagagctcgctgtgaaataggagacatgcaaatagggccccccctttcctgataaaaagcagcccagtcctgaccctgcagccctgggagagaagcaccagccctgggattctcaggtgtttccactttgtcatcagcaacaaacaaattaccatggaatttgggctgagctgggtttttcttgctgctattttaaaaggtgattcatgaagaactaaggatattgagtgagtggacatgagtgagagaaacagtggatttgtgtggcagtttctgaccagggtgtctctgtgtttgcaggtgtccagtgtgaggtgcagctggtggagtctgggggaggcttggtacagcctgggggatccctgagactctcctgtgcagcctctggattcaccttcagtaacagtgacatgaactgggtccatcaggctccaggaaaggggctggagtgggtatcgggtgttagttggaatggcagtaggacgcactatgcagactctgtgaagggccgattcatcatctccagagacaattccaggaacaccctgtatctgcaaacgaatagcctgagggccgaggacacggctgtgtattactgtgtgagaaacactgtgagaggtcggaagtgtgagcccagacacaaacctcctgcaggaacgttgggggaaatcagctgcagggggcgctcaggacccactcatcagagtcaaccccagagcaggtgcacatggaggctggggtttgtttcctgtcaggatttgggacttcctctgcttctgacagtttctctagggaaactctttaattttagatttctgtgcccaccaatgtcatctctacatttttttaatcattgtatatgaggactcgttctcacatgcacaatatgtatattgccacctatgggaatgaaaggtcctcaaccatggtcaccagcatcagagtcgtgaggaagctcaggggtgcctggtgagtcttctccagtcagactcaggacagtaacctcaaggggattcccttgtgagaactcacacattttcatgagaacagcaccaggagtcagttctaaaccattcatgaaagacccactccatgacccagtcacctcccaccaggtcaccccttcacaactggggattataatacaacatgagatttggggcaggacacaaatccaaaccatatcagatacacattgtgaaatacgcatggtggtcaggtaatttgtatttctatcacctcacagcgctaccattttattattttttttaatttactgcatgagtgagtgtctgatgagaacacctaagatctaccctttcagcaacaatcatttttacaatacagtattaactataggaccattgctgtacgttagatctccagaactcatccaacctgcacaactgaaactctgtacaatttaacacacatcacccaatttccctcacctcccaggtcctgggacccactattctactctctgctttcaagagcttgaatattttagatcccacatgtaaatgagatcatgcagcatttgtctttctgcatctggcttattcaactcagcatcatgtcctccaggcccatccgtgttgttgcaaatgtcagaatttccctcttttcaaagccaaacaaaatacagatgtatgtatacacattttctttatacattcatccatttacagtcattaaattattttacaaatctacactattattaataatcttgcaatgaacatgtctttggcaaagtaattttatttcctttgcatatataacaagaagtgggatcaccagattatatgatagctttatttttaacttatcaagtaaccaatcctaccacaggatatttccctttcccccacattcttgccaacatttgtcatctgttacatttctgataatagccatattaactagtgtgagttgatattgcattgtgcttctcatttgaattcctctgataattaggaatgttgagaactttttcgttttctgtttgccatgcatgtatcttctgaaaaaaattatccaggtttttgcccttttttatcagttcatttgttatttgctgttgaggtgtatgggttatttatacatttggacagaacttcttgtcagatccataattgcacatagtttttcctgtgctttgttattaaattcaaagaaatcagttccgaattaatggcaggaattttttttgctccatgtcatttatgagtttatggcttcaggtattatgtccatttttagttgattttttttttttttgggagacggagtcttgctctgtagcccaggctggagtgcagtggcgcgatctcggctcactgcaagctccgcctcccgagttcacgccattctcctgcctcagcctccgagtagctgggactacaggcgctggccaccgcgcctagctaatttttttttgtatttttagtagagacggggtttcactgtggtctccatctcctgacctcgtgatccgcccgcctcggcctcccaaagtgctgggattacaggcgtgagccaccgcgcgcggcctattagttgatttttttatatggagttagagaaggcctaattttatttcttttgcatatgaatgccagttttacaccattattgaaaagactgtcctttctctactgtgtgctcttggcacacaaaatcaggagagacataatgacaaaaaaaatatgagatcaatagtcctgatgaacatagacctgaaagtcctcaacaaaataccatcaaattgaatccagaagcactttaaaatgtgatacatcatggtcaggtgggctttacccctgggatgcaaggctcgttcaatatccacagtaactctgattcacaatgtaaacagaataaaagcaaaaagcatatgattatgtcaatagatgctgagaaagcttccgataggatctaacatctactcatgataaaaaccctcaacagactagacatcaaagaaacatacttcagaataagagccatctacaacaaacccacagttaacatcatactaaatgagccaattaaaacacttatctttataaatgacccagtctcgggtgtttctttacagtgcgagaatggactaagacagcatccaaataggaaaggaagtcaatccgtccatcttcactgatgatataattctatatctagaaaatcctaaaaactctgccaaaataattctagaataaacaactttagtaaagtgtcaggatacaaaatcaatggacaaaaattaccagcatttctataagccaaccacatccgagctgagagtataatcaagaacacaatcctattcgacttacagtatccacaaagaaaatgaaatgcccgggaatacagataacaaagtgaaagatccctacaaggagaactatgaaacacagcatacataaatcataaatgatacaaataaatgggaaaacatttcatgctcatggattggaagaatcaatattgtaaacattgtcataatgcccaaaggaattcagattcaatgctatttacataaaactatcatcatcattcttcacagaatcagaaaaaaatctattctaaaatttatatggaaccaaaaaagaccctgaatatccaaagcaatcctaaggaaaaagaataatgccagaggcatcatgatactgaccttaaactacaccataacgtcttgctaacaaaaacagcctgtactggtacgaaagcagacctgcaggaaaaaaaatagatcaaaatagaagacagaaataaagttgcacacctgcaaccctttgatctttgacaaagctgacaaaaacaagcaatggaaaaaaaaaactctgtgttcagtaaatggttctgggataactggattctggcaggtatgcaaaatgcaagagtgaaggagcctgtgcagcttctacctagatttcagatgtgtagagagccctgcatgcccaggaagaagcctgctgcaggagtggatccaccacagaaagcctctactagagcagtgccaaagatggggaaagatggagttggagcccccattcagagtccccactagggcacttcatagtaaagttgtgggaatgtggccacaaccctcaagaccccagaatggtagagctacgggcagcttgcaccctcagcctagaaaagcttccagcacttgactctcacttgtgaaggcagccccgtggtctgtgcctagcaaacctatagggattggctgcctgaggttttggggacccaatccttgttccagtgtgccctggttgaagtacataaagtcaagagagattattttgtagcgttaggatttaatatctgcagtgctgggttttatatgtgtgtggggcctgttggttgttcctttggccaatttatccctttgggattggaattatttacccaatgcctgcatcatcattgcaccttggaagtaaacaacttttattttttaaatttgcaagctcacagctggagggacattgccttaagactcagatgagactttgaaaatttgagttggacgttgatgaagttaagattttgggcactattgaaaaaaggtgattatattttgcaatgtaagaagaatatgagaactttgggtccgagagtgcaatgatataatttaggggttttcccctccaaatatcatggtgaaatgtgacccacaatgttggaggtggggccaactgggtggtttgggtcatggggaaagatttttcaggactggcttggcatccaccccatggtaattagtgaattcttgctgtattagctactgtgagatctgattgttcaaaagagtcttgcaatcctgctaccctctcatgtaacccctcctcacaatatgacacagccttctccccctttgccttccaccatgactgtaagcttcctgaggccctcacaagaagcagatgctggtgccatgcttctcacacaacctgcagatctgtaagccaaataagcctcttgtctttgtaaatcacttggcctcaggtattaatttatagcagtgtaaaatagactaatacactgcccaaagcaatatacagagtccatgcaatttctatcaagtaactaattaattatgtatttttaaaaatcctaaaatttatatagaaccgaaaaacactctgaatagcaaaagcagtcctaaccaaaacgaacaaagctggaagtaccacattccctgacttcaaattacacagcacaaagataataagaaaggcagcatggtagtggtagaaaaaaaatcaagagcccagatatatagccaaatatctacaaccaacagttctttgacaaaactgacaaaaatatacactggagaaacaaccctctattcaataagtagtgctgggagaattagatagccttatgtagaagaataaaatgagacttctgtatcatcatagacacaaattaactgtgaatatggattcaatgtttataaactcataaaaatacttgaaaaaatctaaaaataatcctctggacattggcctaagcaaataaaatatgactaagacttcaaaagcaaatgcaatgaaaacaaaattagacaaacaggattaattgaaccaaagatcatctacacatcaaaagaaagaaccaatatggtgaacagacaacctgtgaatggtaaaaaaaaaaaatgtgcagtctattcatcaaatatatagaatctacaagtaactcaaataagtcaactagaaataacaacttcataaaagagtgagcaaaaacgagatatttctcaaaagaagacatacaagtgttcaacagaaataaaacatgctcagcatcacaaatcatctgataaatgtaaattacagacaacatgatatagcatcttccaccagtcagaatggctattaaaaataaaacagatgtttgcagagaagcataggaaaaataatgctttttatatgcttgatgagaatacaaattggtacaacctctatgaaaaacaatacagaaatttctcaaagaactaaaattagaattaccatttgacccagtaacccctcctggtgggtatgtttctcccaaaaggaaacttctatataagaaaaagtcacctgcattcctatttttattgcaacactattttcaatagaaaagtcaagtaatctctctaagtgtcaatcagtggatgattaaataaaatatgatagatgtaaatcatggaatactatgcagccataaaaaatgaaattgtgtctttcacagcaacatgaatagagttgaaggacatttcctaaataaaataactcaaattctcttttataattggaaagcaaacaatgggtacacatgtacatagagaaaaacaatagacactgggtactgcaaaagaaggcaaggtgagaggaaagtgagggttaaaaaatcagctattggctccaatgttcactatggggtaacagttacatcagaagcacaaacctcacctttatgaaatatattcatgttacaactctgcacatgtgcaccctgattctatgaaaataaaaacagaaaacatgaacagaattgttagactgctagctagattgaccaacaaacaagaaaaatgcaaaagtagcaattctttgttttgtaaccctttctcattttctggtaccataagaaattgtagactatcgtcctatattcttttctgaagtgctaccattagccatttctcaaagaaattctggttccttttttcttttattttctttcattttttttagacagagtctgcaacgtccacctcccaagttcaagcgattctcctgtctcagcctcccaagtagctgggattacagacgtgcaacaccacacctggctaatttttgtatttttagtagagatgaggttttgctatattggccaggctggtcttgaactcctgacctcaaatgatctgcccacctcagtctcctaaagtgttggaattatgggtgtgagccactgcacccagccgctggttccttttacagaagaatagtattaaaaactcatatcttgattcttgatgtactttttgttaatttcttgtagaacatctcaagtaatcaatacaggaagtatttgttgtgtattaacccatatatatatatacccacatctaaacggtttttatttatgttcctatattatgctaaacttgcaaatccactgagataccctaagttaataccacatgaatgattttcaccttccttctatgcctttccctaacctagcactccaaccgtggggaaccccctcccaccacacaccatccattccctttgtagtccatttccaggattcctgtagagtggaacccgattgtgtaagttgtgctcttttgtggaacatcatcaagtggagtccagtgctgacgtgcagtttcttttttctttaatcttatggactacactatttctgaacctacttagtacctcttttgatttcatacattagtataatggcataagatattttctatatagtctgcattccatcctggaattcctaatcacctatttttttaaaatttcttgtggattaagattgtattagtcagtgtcccctagagggacagaacaagtaagatacacatacacacacacacacacacggagtttattaaggagtattaactcacactatcacaaggtccacaataagccatttgcaagctgaggagcaaacaagccagtccaagtcccaaagctgaagaacttggaatccgatgtttgagatgaggaagcatccagcaggggagaaagatgtaggctggaaggcgaagccagtctaatcttttcatgttcttctgtttactttttattctggccacacttgcagctgattagattgtgccacccagattaagggtgtatctgcctttttcagcccactggctcaaaggttaatctccttcggcgacaccgacacagacacacccgggatcaatactctgcatccttcagtgagatcaagttggcactcagtatttagcattacaagtccaccctttgtcaacttgaacccatacacatctcctgagattatacataatcttcaaataaagacaagaataaagtcataattatgcctaataatacaattattcttcttacaactggaaacacaccaatccccaatccaaatggtactacatatgctccactccctcaaggacacagccaggatcatctgatgacttggtgtctagatggcttcagcacttttaattttacctccaatgttagactccactttatcaatgcagatgtagcagaatattttaagacattgatatgctgaaaaattcaacagttcataaaagttgccttcccaccacagccagtggttactactgaataaggacctgccatcctctagggagaagctataatggatggggtgcactgttggtggttatggaaatcgatccatcgtggcaaatggcagcatctttctttgataacattatattctattgtgcatatataccacattgtctttattcatttgtctatctactgacagattttttccatatgtttgctgttattaatagtgtttcaataaacataggatgcagatatcttcacaaggtggtaatttcatctcctttggatatactcccagaaacaggattcctggtcatacaatatttctggctttaattcatttaggagcctttatactgctttccataattgtgaaaatgtagaatggtatagccattatgaaaaacagtttcagttttgaggtatgatctgtaaacaaataatgtttgttatggctctcaatgagagtttctactaaatatgatggaaggtcaggaaggtctctcaccttaaagcagggatggattatgcctcttatttcctaaaagcaaaagattggaagcatgcatgatggaggtggttggcaggtttcaggatgatctcataagaggagaatctgttggataaaactgttgggttttcagtcatagacacacctacactcaatatgaaatgatgaaatcaagtgaggatctagaatgtgttcgcttgaagcaacagcatattctcaaaggcacctattgctccatcacaagggtgatgaacttttgaaaccagtaaagtgtgagagcacagtaagtgataaagttatcacatttacatgaagtttgtttaatgtgccaagggctcgcacagattaatcataaataaacacaatgtattttagcatacatagatgtctagagaagaatcttcttagagaaacttcttcaggttacagaaatctgtgtaagttgtagatctaatggagaagtgtctatgaatactggtctgtttttgaagtatggaaagatgatctcttttggagtaggcttgcgattgtgttgatttcttaattgtttcttgagttgtaacaaaagaaccaaaaaaatgactaaccggagtttcatggctgtgttgataaaaatttttcataagctttctgtcaattatttgagaccagatttcctgatttttttctccaatagatacatgttcacaagatctcaggaaaccacctctcaggtgctttagtttaaaagactagcttcctagaaaaagaagattctgtctaaccatgacaagttggtttcatctgcaaaccatcaagtttgagacctcattgtcaagaatcataaaaattttaactccaatgtactgaaaatcataaatctcgaatttaatgttgataggcattgacaaaatggttcattcttggatgcgtcctatgttgctggctcaacatatcagttaattgagaatcctcacttagctccctctgtttgtagcactgagttgattgtcaatcttcagagtcatccgttgaaggagagtcctgaggttcatgggattcttgtagacactcaggggaacaaaagaaagaaacagaattgagggctgccagccatttccacatcactaggaataattaccatctaagtataaaggtctgcatcattcagaacaccctgcatgacaggctgatgcaaaaaatccaaccctacagaggctccacagcaacctttacagttctttccgggaagaaataatctccaagttaagtgagtcagtaaagctgctctgagctacagtaaaaattggattgggcccgatttgtctgagttcagtgtaattattatactcagctgctgccccaatatagactgaggatggataatttaaatgagcctggctatgtggtttgttatatatctgaactaaataaacataaagggcctgtctggactagcgtgagggtgagagatcctgggagccccagccccccatactcttatctcccttcctccaggaacctctaggttctcagggtgagaatccacaagatccattcatggctctattaccaggagaccaaaatctctgaccttgttcatacagacaaacaggcgaaggacatttttagatccttatctatgtggcgaaaggcaatctatccccattacaagccttaccagcaaccttcctttgtcatgaaaatgggtaaaattagccaataggattacatttaagaaaattttcctgtgatgttccagccagaaaacagcaaaaatcagcttcacacctggagacttcttgcatcggtcacagcccagagaaagaagatcaccatagcattaaaatgcaactgtaagaacatgtaatgcttccatgttccacgcattacgtctcaccagtttagtcaatatggattaaatatgagagtgtggcaattcgcaaactctatctgaggaggaaaatcggataaaaaatgttatgaaaaataaagcaatttgaagcctctgacttcagcaacttcaccactaatgaaatgatgtaaccctcattggcctcaaatttagttttcacggggcatctgcagggttccaaagtgagaccaggtgaattcaatgtgcatgcacttcccaagtgtccacttgtattctgtttctttacttctgtttacagaaagtagacacatattcagtcttagtaccagtgtagggagcgctttccatgagatggataccagaaaaaaatggcaaacatgggatccgttaatataaaaattagccacgatgtatatatatatatgtgtgtgtgtgtgtgtgtgtgtgtgtacacacgcgcgcgcatgtgtgagttgaatagcagagttggagtgggtttctatccacatgtacctgcacctgcaggtattctcaggtgccataatcaactgtaggaccctaaaggaaataagagtctcccctcaacccctgaagagtgtttgggttcaccgtgtgtccaatgattctgtgcctcttgagctccaggaaagggctccctggtgatgcatgagatcttttcttggagtctctctgcagagttcactgggtttcctaaaggcaattcactatttcaaaagatggtgtgaggagcatgtggtgtccctaaaggagaattctgagccagggcacaaccactttatactgagctggatacactggtaggaatatactctgtcagctcagatagaaacctccctgcatggttggggctgggctgcagggggcgctccggatacacccagcacaggctcccgccccagagcaggtgcacaggaggctggggagaggttcctcccagggcctgggacttcctttaaaaatatctaaaataagtatttcacaaagactgctgaagtttgtataaatatctattcaattgtgagcatttatcaaactggatgttgtaatgagaaccacttttacaatggggatttcaaactctgctggaggtcaggaagagatcctttcttataaataaatgcaatttttggataaacacagtcattccctaaataacgcattcacatattatggtctagaaatgatgcaagttgaccctgagacagtcaaatgtggtttcaaagtgaggtgctgtccttgaggagcttgttctccagtgggggaagctctgtcaacacagagttcagggatgtgtaggggacacatggcctctaacaggattacggcttgaaccctcagcttctacagttgtgtcacccatgtgtctgtttctcatactgggtcaggaattgggctattaaatagcatccttcatgaatatgcaattaactgaggtgactatagtatctccgttccctgagagcctcacccaacaaccacacccctcctctggagaagcccctagatcacagctcctcaccatggactggacctgaaggatcctcttcttgatggcagcagcaacaggtaaggggctccccagtctcagggctgaggaagaaaccaggccagtcatgtgagacttcacccactcttgtgtccactccacaggtgcccactccctgcagctggtgcagtctgggcctgaggtgaagaagcctggggcctcagtgaaggtctcctataagtcttctggttacaccttcaccatctatggtatgaattgggtatgatagacccctggacagggctttgagtggatgtgatggatcatcacctacactgggaacccaacgtatacccacggcttcacaggatggtttgtcttctccatggacacgtctgtcagcacggcgtgtcttcagatcagcagcctaaaggctgaggacacggccgagtattactgtgcgaagtacacagtgtggaaacccacatcccgagagtttcagaaagcctgaggaaggaggcagctgtgctgagctgaggcagtggtacagcagttttctgaacttccatagtatctcattttgcattgagttccgctttaatattagccaagaatatgggatagacgggtgctcctaagagatccttaacttgcccattttgatgggttttcccaaagacgtgagaagccacttttttcgcaaagcatcccaaagccatgccctgctccagaaacacgtgtatccatttcctggtctttgattaactgacaaactctcatcagcgcacctgggctaatttcacatcaggtagaaatatgtgctttaaagcaaggctaacgttgtaatagcaattcctgcttaataaccttcagcattgttgttgtgtgctccatcaactaattacgttagttcaaggttctcaatgggagtttctaataaatataagggatgtatagaagttcccctaattaaaacaattgtgaagacaacctcagtgttcaaccatatttcaacccttcaccacaaaggaactttcatctctcctggaagttgggttcattttcaaattagtttttttattttaatatctcaagattattgtatgtgactattttagcagaaagtgaattatgggaacttgaactaaccaactgaaaatacattcagaactaattaaacaagatgccagaatgtgattggctccaggcattttaaattcaacaggttatgtaaccaggctttaaatttgcacatcttcgtgttaccttcatgacacagtcaactcccattatgtaagaaatggtgagtgcattcccaagggtcttgcacagttataaaaatagacttgatgaggtgaggagttgtttaaattcccctctgaagaagcagcatcaacccaacaaaccactctcttccctctgtgactagagctctgtcacaggccacatggacctaaatccttgatggagattacaggactacgtaaattggactgatcgtttttatgctgttaaattaataggtgagtctgcactccagcctgggcaacagaataatcttgtctgtaaaatacaaaagaaagataaattaatagatactgactttgacatttcggataataatattttcataaaccgaatttaattatacccacattgttacctacaccttcactgaaaagttcctagttatgttgagttccatcaacactccacatgttcaaatctggacatccaagagagtctagagaataaaacgcaatgagggcagtgaaacttgcgtatattcagcacctcttaactcaggaggactcaatacaccctggaacactctgcttttctgaatggctcacaatgactccagctcactctccaacctcctcaaacatctggcctctgtttgccctaagttcacgctctgctcttagtctatgttctgaagtctttgtagaggtgaaaatgagctgtcagatggatcttccttctcactgcaacatggaatttgctatttcacttaatgaccactctttccacaatggttgatttcttttggcctgttcattactggtgattttcaagggaatctcagttgaatctttactgttttgcattttgtctccatgacaatgttgggaagtttttcttctagcagcataacatgatctagtgacctgacacatttgcagcaaacaatacctacaaattcagaagctctttggttttctttccacgaaatataattcttgctcttctgtgtatgagcacatcctagcatccctgtacacacccacgtagatgtctacacgccgatgaaatattccctgtaaataaaaaaagtatctcagtttctctcaatgttcataattctcctgagggtgaggaaggtacttctgggtctgctcaaacaaatggcccagagaccacctggtaggtaggtaaggagctcacctcgctctggatattgagtctgtctctttccctctgtcgtctcatagaaggccagcccacttgttcagctcctaagaagagagcccaggtttatccagattatacaacacaaccagcttctgatgactctcctgttacaacatccatggagatattttgtgtattatataattcaccaaactaatgtgaaatgcccaagttgcaatactgcacaccctagggtatgttcttgcaattcagcggaggagaaattctttcagagacagatggatctgaattggtaaatatgtgggtacgaattctgggcttgagtgtcattgtccagccatgtttcacaggtgtgacctgtcagggaagaaccagagttccttgttctctcagagggtagagctcacagaggtcctctctggttcccaggaaaggtaatttcactaatcttggtgatgagactatcctccagtgctgatgtactatagagttttcatctgaagctgtcactgctatccccaatgtacatcttttcacacagaaatgtttagaggtcaggccatattctcagggttacacattgagaaggatggagatatattctactaccttctcctgagatctcacacacaatctcaaatttcaaaaggtctcagaagggcagctctcaggtactatttaaaaataacccacttcctgggacaggtagcatccttctaaccatgatggatgttctgaactacagtacacattgcatggatccaggtttgtctcaattcactgtgattattacactcagcagctgtttcaatatgtctgaaggggtaaatgacaatttaggtgacctgggtgtatggttggtgttatatgaatctttaaatgtagaacagtattaactgtattccaaaatctgtctttgatccatgatcacacttgtctcccagaccagctccttcagcacatttcctacctggaagaagaggactctgggtttggtgaggggaggccacaggaagagaactgagttctcagagggcacagccagcatacacctcccagggtgagcccaaaagactggggcctccctcatccctttttacctatccatacaaaggcaccacccacatgcaaatcctcacttaggcacccacaggaaatgactacacatttccttaaattcagggtccagctcacatgggaagtgctttctgagagtcatggacctcctgcacaagaacatgaaacacctgtggttcttcctcctcctggtggcagctcccagatgtgagtgtctcaggaatgcggatatgaagatatgagatgctgcctctgatcccagggctcactgtgggtttctctgttcacaggggtcctgtcccaggtgcagctacagcagtggggcgcaggactgttgaagccttcggagaccctgtccctcacctgcgctgtctatggtgggtccttcagtggttactactggagctggatccgccagcccccagggaaggggctggagtggattggggaaatcaatcatagtggaagcaccaactacaacccgtccctcaagagtcgagtcaccatatcagtagacacgtccaagaaccagttctccctgaagctgagctctgtgaccgccgcggacacggctgtgtattactgtgcgagaggcacagtgaggggaggtgagtgtgagcccagacaaaaacctccctgcaggtaggcagagggggcgggcgcaggtactgctcaagaccagcaggtggcgcgcggcgcccacagatcccgaggccgggtccggagcaggtgcaaggagggcggggcttcctcaacagctcagtggtctgtctcctcgccagcacctcagatgtccccaggactctctttctttattatctgtggttctgcttcctcacatccttgtggcagggaagaaaggaggaagacaatttttctgtttactgttgaggtttcaccaattactagaaactttcctacaagttcctgcatgactcattttgccatatatggattctcaccatctcttgatttgtttcatcaatcgaattgtgccctatttgaaattaacttactgaaaccttaaatccaatggatctatactggaattttaatgatgtaattgaggttaaatgtggtcaaagtgtgagaccctaatgcaataaaccgttgtctttataagaagaggaagagacaccagagacctctcacttttcacgtgcacacagagaagaggccatgtggagacgtagtgcactagaaggtggccctgtgcaagccaggaagaagccatactaagaaccaattttgccagctccttgatcttcgacattcagactgtagaattgtaagaaaatcaatatttgttgtttaagccacccaatcctgttgtcttcttacgaagacccaaactgactaataccacctaactctgttagctctgtctcctggagggagaagcagccccctgaggctgggcactgcatctctcagatttccacgtgaagtaggcaaaaatagtagttctcatataaaaatgtgtcatggctctgttggccatttttgagcatggtctctgaaaccagccctggtgtgtgtgtgtaacaaatgtcccttatcttttatttggacataacaaatagacgataggtaccagctggatggagattggccactgatcatcttctgttctccttagtatgtcacagaaaaccacaccaacatcaccagcatcactgtttttcttctaccacctcaaacggactacagaaatgatccctgcagtatggtctatttcttcggctttcgaaatttgcactgaatctcttcctaaatggggagctacatggggtctgagttttgttcctttcttcccagtcttccccaagtaccaaggacagaatagacttaaaatttggccatcaatgcccccaaacaccacatcactttctaaaatccacatcctgcatccatccttctctggacacccctcatcaggctacccaggaatggccagaatctggtatcagcttatgggctgaggccacgagttatacacatgtgtgatttcagtcacacacactctacttcaggaccacacctgtgttctgaggagctcaggcacctgctgatctcagtaattctctaataaatcacacacctcttattaataaaggtccagatggccccatcagctgcagagcagtggagtaaagctcatgggtgggtccatcaggcagaagtcagacaatggaagggatggctggtcacttccattttcactgatgttcgcaatgaattttaatggaataaaacaatattaactacaaagagacagaaaagaagactggctcgtcaagatatttaaggacaaggaactttatttggggggaaagtgaaagacacttctaaatggaaatccctaaagcacatacagcagctgacagagtggccactgtgcacatgagggctgaggagatggatggtagagtccattcctgcaacatgtctctgggtgtgtgatggttagactcctcatgcatatgaatataagagctggactcatggagaaaaaaagggccatatcccataggaaaggaagaaaaaaaaacagatgggcacccctggagagagctcattagatttggtgtgtttaagatgaaaatttcttccaaaaattgtaatgttctaagctaaatatgaatctcttcaataaactgagaataggagaatggagctaggacttgagagaggaaacaaatcttgagagagcagaaagcaaatccacaaaaactgtcacatgacagaggtcagaatggagctgatgtagctacttcactattctgcagacttattgaccatgtggagaaggggcttgaacaaatggagacgttctccaaccttctgaatcagcctccttcttatgcatgagtagaaatcatagttctgggggtgaccttcccaattttcctgtccatacctcttcccccaggggtagagtgtcttcccaaccacaatggtttctcaccagtgttctcagcttctcctccattgtacttaccctgcagattaagaatttcttctagatggagttctttgggaattttctgttttctttagtttctgttgactccaccacacccccataggatacaggttttattggatttcccctggaaatagtgggggtggatccaggcgttcaacagtcctcgctgttcttcccttcctgtcagcaccacaggacagcagataagggagttgactgtggatttttcaaattcctgggaaaagcctgcaaggactagtagattcacactctaataccattagcacatgtatccaaaaagaaacctcactaaatatttccaggttagcctgttcctctctcagtgccatccagtggcacctgccctgggttcacgaacatgtgggccccagtcctctctgctggcatctctctcctcacatttcagtcttctcgttagctctgtgaaagcagctcagatatgttaaaaggttttcttcttcatttattcagtttttcaggtttactgttaaggaggtcagaataagatcatagtttcctcatttttcacatttgcacgctgagtagccactttctatataaaagccagaaactaagggaacaaatcaaatatccatatccactacaggtgaacgttaaaaaatttgacatatgattatggactaaagtacaatgcagaattagaatcaaggcatcctcattctcataaaagcatgtctacattctcaaataactctgctgagtgaaagtagctgaagaattaagagtgcacttcataaacttctaattgtataaactgcagaaggtacaactattctaaagtaacagagcagatttgaaatttgggagaaatgggtgttgaaagtaattgggtggtgagatgaaattacagagaagtgacagaaagatttaggggttaacttaattgtacacaacctgattaaagtttgcacacatacgttaccattttccaaatggtgcagtgtagatttgaattaattattaattgtacttaaagcagtaacaaagaaacaaatgaatatgttggttgaggaggagcaaaaaatagatgggtatgaacactcaaaacatctcagactcttgaaagtacacatgcttgaacactggttttctctgtatactttaggtaaagagcagaatacattaaaagaaaacagagatgtcctggcgggggtggaatcctgcaaacctcactaggcgtgtcccacactgccctggagttgtctcaggggagcagtctcctctagtggtcagagacacaggcatggataatggggctaatactgtccagctgtgtgaccttgaacacattgtataaacactgttccatatgtaatttatcttccttaaaatgtaacattgacacttgcattaaatgtattctacaaatatgtcaaaaagaagatgacgactgctaaatgattatcaaggcacaatcatataatataatgatattttcctgagtgataagatgactaccaatctcccccagggcactttgtttgctctgagccctgcgcctcctcaggattcccatcccagagcttgctatacagtaggagacatgcaaataggtttctccctctgctgatgaaaaccagcccagtcctgaccccacagctctgggagagaagcgccagccctgggattcccaggggtttctatttggtgatcaggactaaagacagaggacccaccatggagcttgggctgagctgggttttcactgttgctgttttaaaaggtgaactagagagattgagcgtgagtggatacccttgagagaaatggtggattatgtctgggagtttctgaccaggatgtctacgagtttgcaggtgtctagtgagaggtacagctcgtggagtccggagaggacccaagacaacctgggggatccttgagactctcctgtgcagactctggattaaccttcagtagctactgaatgagctcggtttcccaggctccagggaaggggctggagtgagtagtagatatacagtgtgatggaagtcagatatgttatgcccaatctgtgaagagcaaattcaccatctccaaagaaaatgccaagaactcactgtatttgcaaatgaacagtctgagagcagagggcacagctgtgtgttactgtatgtgaggcaccaggtaagaggacatcagtgtgaacacagacacagtttcctgcaatgacaagggaggaggctgggctaaaaggggcactcaggacccactgaaaacgggcagctctagggcaggtacagatggttatcatgggctgctttccttcagggtctgtggcctcctctgcatctaccagttcccctcggagcctctggacatttatgtttctgtggccacccctgacatctctggattagaaaagtttattataggaagaggaaacattctcatttgtcccaaagcagatgtaagtaatggaagcaaaaaatgcacaggaggccaggcggggctgtagatactgtcaccccagaatgtcaatctcaccactagtactggagagggaagggagtttgatggaccttccctaacaaccctgtggtccaagataagtccaggaagaccattggtgcctcccagagcacagttgtccatcagggatgtccaatgcgtcccagcagcagccatgcctcagtgtctccactgtgcacagccactgtctgggaggagctcccaggatgggtgtctttggcacacaccaggtggcgggtgttagagtgcagtgcagcagctggctgcctgttctattgggctccctgatgctggagagatgggaggtgcattcgcagggccagcaccctgtttgtgaatttttatataaaaaccctgattttacttcatttttgcagatgacatagataactaaaaacagaatctgcaaagaaattgtaattttcaactttaccccaaattcattgtttcttaattctgtgcaagatccagacatattattgccttcctcatgataatttattctatgtaaaaccgaaatcattttttctcctactctttgtttctgttcaagtacagagatcttgagcaaagtaagttgggttctttccacacactaaccctcaccttccccagagaatgagcagagattgtcctcagtctgagtctaagggaggagctgtttctggcacaatcagagcctgcagagacccccaggtgcagcttcagtgaagtcagacatttctccatgtgggcgacctccagtgcctgtgactgctgctcaggcctaattgttggttaagtattacgacaccctttaggtgatcacatctcaagcctattctgaaaatcaccatgaacagagatagttcaatggccattctcctgacataagtttctctttattacttggttccaagtatggagaaaaatgtgaccctatatttgtctgaatccaacatcagcatccacggcattacgctaggagactcactaattgagcacaagtgagctcgttattctcatagaaatgtaagtatttggaaatttcagcgtgttctccagaacctgtggctgccaacaactgtatttctcggtgcactcttggcctggtgaagccttcacagaacctctccctcacctgtgccatctctgcattctccatcacaaccagtgtttccttctggagctgcatccatcagcgcccccatgggaggtactggagtggatcgggtgcataggtcatggagggagcacagattactcccctcttctcaagagtccagtcaccatctccagatccatgtccaaaaagtacttcttcttacaggtgaactatgtgagcaacaaacacatagccatgtattttagagcaaaagacacagtgaggaaaccacagtgtgaactcatacccaagcctccctgtgggggtgcataggacagccagggttactcaggacaccaggctccctcaggacaccaaggggcactcaagaccattgtagaggcatgcaggtagctgggggctctcaggaaccatgggggaaaatcaggacaccaaagggtgcttggtacagcagggggctcaggattattgtggggattcagaaagagcaggttcaaggctcaacctcagggcatgtgcagctggtgtgaaaaggggctggatgaggcgttttgtgtcaccatcatgtttcaccaccagacaccctccactacctctattctaatgcatgtgtttgtatgattagaaaatgatattgatataaatatataaccatagctaggtgtgtcaagttgtcctctccatcttatatcagccttgtctgtaaggactaattccccataattacttgagaacctcataaattgtggtcaattatgtaggattcctctctttttctgccttccttcctccctccttctctctctcacacagaaacttatatacagccaccccacaacacacataaatctataacttttattacctgatgtattgataagtaatctaaagttacataaaaatcagtagttcactgtcaatattgtaggagaagggaaggtctaggaaggaggaattacagaacaagaggatattttgagggtaattgacttgttatctatgtggataatgataatgtctatgaccatatttgtaaaattgaacacttcgtgtggagactattatttttttatttaaccccatgccattattttgccgtattctagcatttctctaaaaatacagaaatgttcagcactcattcatgtgtatattcaggagtttctgacttttcatgtattttatttatctctgtctaattgctttgataccaaattttacctagtataattagtactacctttagcactgattataagtctcactcctccatcatctccttttttgccacacaagctgaatctagtttggactcataggagctgcttcattcaatgccagtgggagtttcaaaccctatcaacccccctataaactgtcattaagaaagtttatcaaactccaccagtcatgtgatattagttcgttttcacagtggtataaagaactacctgagacgaggagtttacaaagaaaagaggtttagttgactcacagttctgcatggctggggaggccacaggaaacttataatcatggtggaaggtgaaggcgaagcacggcacatcacacagggcagcaggagagagagggggaagtgacacatagttttaaactatcagctcttgtgagaactcactcactatgatgagaacaacatgggaaaactgccctcatgatccaataacctctcacctggtccctcccttgacatgtggggattagaatttgagatgatatttaggtggggacacaaaacaaatctatagcacatgtccagctgtgtcctggagttgtttcagggatccagtgtgtactgttgatagaaacagtgatcatcattctagctggtgtgagatggtatctccttgtggtttagatttgcatttctctgatggccagtgatgatgagaattttttcatgtgtcttttggctgcataaatgtcttcttttgagaagcgtctgtgaaaaaaaaaaagaaacagtgacaccaagctcacaccatccgttgtagttgacaacatgcaaagccaagagatctcaactgagatttagtgtgtgtgtcatgtctgatgaagtcataagctcagagcaagtgaatatggaaaagtgtattatctgcacagtgtaggtgtctgctgagtgcagggcaggtctcgcaggaaaatctaaaatggcttgaaagaagaggaaaggagactggctcagggtttttataatggtttagtggtggtggcacagtgaggcttcccactcacagatcggggtttataaggtttgaaactcccactgccattgaatgaagaagctcctgtgagtccaaactagattcaccttgtgtggcaaaaaaggagatgatggaggagtgagccttaagtaatcaacaggcatgcaccaaaagatagagcgacaacttattctaggtagcaagaataaaaataatgaaaaagaaataagggttcagtatgggtggacaagacccagatctacagaaatgagatgactttagaaatataaggaaataataatgagaaaaagaaggaggggatggggaattagggtcctggcctaatgtcttgggtagaagcttctcacaatcaaggactatcagcttattctgcaggtcttgggtcacacgtctgcttaaaaacatcagaaatgccaggcaatcaatgaggatgctcagtttagcatctcctatttgagtagatttacagttgtgtggaattcttaattgattctttttggtttgtttttagaggcaggctctcacactgttccacagcttaaagtacagttgtgtgatcatagctcactgtaattttgagctccggactcacgtaatcttcctgtattagcctcctgaatatctagaattagaggggaacgccacccctcacctgcttattctttaaaatattttttcatagaaatagcatctctttatgttgcccaggttggcttcgatttcctggtctcatgtgatttccctcactttgcttctgaaagtggtgtgattatagggaagatccactgcatctgtcctgaattgattcttcagttgtaaaacatgaagccaataattaactgcctgactgttttgtgcagtgagttagttaaaagtttctgataagattccttccaatatgattcaagagcagtattttctgctgatgttcctttcagtttccttgttgaagatcagaagacactgcggaaaagatgtagtaaaaaggcagttttaactcttcatgattggagtggatatcacataggaatccctttccgtattttgtaacacatgcatgcaatagaacaaagatgatcccttggtgtaaaatctataaacgtatgggccttttagctaccaagtcatagggtaataactgatggaccctgaggagtgaaccatgattccatagtgctagtgggagaacccttggccaaggaagtttacattttattaaaattgataatttttatgtagcgatgccattttttaaacattcccagaaggttgtgagtgggattgactctgtcttctgtgaacaatgacagtgccctccatggttagataatattttaaactagattgagctagagtggtttctgtattgaatcactatatttttttagcttcatgttagctttttgtgtgttagcatttgctttaaaatgatattaatcagccctctagtaggtagaaattcatctgagggtttcttcccttgttgtccatctcaataggatttccagaagacgtaagaaccctctctgtttctaaaaatattccaggctgggcgctgtggctcatgcctgtaaacctagcactttgggaggccgaggtgggtggacccctcgaggttgggagtttgagaccagcctggtcagtatggtgaaacctcatctctactaaaaatacaaaaattcgccgggcatggtggtgtacactcgtaatcccagctacttgagaggctgaggtgagaggattgcttgaaccctggaggcgggggttgcagtgagccgagattgtgccactgcacttcagcctgggcgacacagcgagactccgtctcaaacaaaacgacacaaaaaattccaaagttgtgcaccctctaaaagcatatgtacttaattctcatttttaatttattaaacatctctaataagttcaatgtttcctgccttctgagttgatttcctaacacatagaagaatatatcctaaatgaaagtttgtgttcttaatacaaattactagttaataacctttacttttattattgaggtattatacatcaatgttaatcaatcctctcaatgggactcttacctaaagaatatataaaatattttcctgatcatgacatataatagatgtgaacacattcttagcattcagccatgtctcttgtctattaatattataaaccacatgctaactttgattttattggtaattgttctaatttcttttttttcccacttctctggttgttttttttttaactttaagttttagggtacatgtgcacaatgtgcaggttagttacatatgtatacatgtgccatgttggtgtgctgcacccattaactcgtcatttaacattaggtatatctcctaaagctatccctcccccctccccccaccccacaacaggccccagtgtgtgatgttccccttcctgtgtccatgtgttctcattgttcaattcccacctaggagtgagaacatgtgttgtttggttttttgtccttgcgatagtttgctgagaatgatggtttccagcttcatccatgtccctacaaaggacatgaactcatcattttttatggctgcataggattccatgatgcatatgtgccacattttcttaatccagtgtatcattgttggacatttgggttggttccaagtctttgctattgtgaatagggaattgttctaatttcaaactagttaatttttatcttcatgcagctagattattatgtgtggctatttattccgagagggataaagacaacattaacaattttcactgcaggcatgtctaggcaactccctgtgcactatgaccctggggcgttggagattctatggggactcttccctacctgcctaggagagttctctgccttctacctctagcattttcctctttgaagaagtacatctaactgtcattagaatagagacaaagacaagtcttaactgcttccagctgaggagggatgctgtttggggaagatctctcttggaggtctaagggaccccaggaaaagggagccattatcccaggcttcagttgcatgaccatttggagtttgatggtctgaaaatgagaagaggcaaatctggttattagaagacatgtatgaaaaccaaacaaggtggcaaggacagcttgaaagaaaattccaaggctgctgacattcctagataactgcagctgtagttatgcctgctaaggtttgggcgcatggggcttggcttttgtcagctccctgggatttattttcccaaacaaagaaacctccaggttaggggcaccctattcattcccatcacctggcatgatttaaaggataattgcttagaattaaaatattgatccagattttttatattccccatcgctttttgtttcttctgggctgtagccagagatcattgattggcgctcaggaataagcagagttagtctaaaatgcaggcaaatacttaaacaactgaagagattagaatttaaagacaagtgtatgatatgttttgaaatacaatgtttctctttccagttttggtttttgtcggcagcaaataatgataagactgagttgtttgcaaaataaactttagtcttaaacttggcctgattatttgcataaagtgcagcaagaatattaataataattctgtaggaaaagcctgcaagcaccaggagcttcacagtctaacactatgagcacgtgcatcctcacgcaactcactgaatatttccaagccagcctgttccgatcttaaatgccatccagtggcatctgccccaggtacactaatacatgggtcctgcttctctctgcagcctcctctctcctcagatttcaggttttgtttattgtttgttttctctctgacatcaacacagatatgttgaaggttttcttttttttatttgtagttgttcagctttgttgttaatgaggtcagaataagctcatagtttacacatttttacattcccatgccgagtagctgcttttctctatcaaatccattaactgagagaacaatcacatttcgttacaggtgaacagttaaatagtttggcatatatttctgtgctggaatctaatgcagcttgaaatcaagtcatgcctcactcattgaaaaaaacatggctaaattctcaaagaattgtgctgagtgaaagaaactaaggaattaagagtaaattttacatgatacatttgtagaaattttagaagatgccactattataaattaacatggagaagatttaaatgtttctgagaatatgctattgggagtaatggggatgtgagttaaatttcagaggaataagagaaagatttagggattaattttttcaaaccttgattgaagtgctgagtaaatggttgcaaacataggtctacatttttcaaatcattcaccataaatttgaattatttattaattacactcgaataaagcaataaagaaactgatgagataatatttgactgaattgcatcaataaatagatcgatattaacacaaggaatataactgatttccaaaaacatacacatgaaccatggttcactctgcgtatttagataaattacagaaagttgtcataacagatggggaatcctgcagacttcactaggcatgggccatgctgccctggagttgtctcaggggagctgcctcctccagaggttagagcacaggcccaggtaataggactaaatttttagatgtgttatcttagacacactgcacaactgctgtgttctctatgtaaattatctcctgtaaaatataacattgaagcctgcattaaatatattgtgtaaatatgtaagaataaaagaaagttatgagagctaagtgttaatcaaggcacaagcatataagatataactatattttcctgaatgatggaattactaccagtctcccccaggacacttcatctgccctgagcccagcctctcctcagatgtcccacccagagcttgctatatagtgggggacatgcaaatagggccctccctctactgatgaaaaccagcccagccctgaccctgcagctctgggagaggagcccagcactagaagtcggcggtgtttccattcggtgatcagcactgaacacagaggactcaccatggagtttgggctgagctgggttttcctcgttgctcttttaagaggtgattcatggagaaatagagagactgagtgtgagtgaacatgagtgagaaaaactggatttgtgtggcattttctgataacggtgtccttctgtttgcaggtgtccagtgtcaggtgcagctggtggagtctgggggaggcgtggtccagcctgggaggtccctgagactctcctgtgcagcgtctggattcaccttcagtagctatggcatgcactgggtccgccaggctccaggcaaggggctggagtgggtggcagttatatggtatgatggaagtaataaatactatgcagactccgtgaagggccgattcaccatctccagagacaattccaagaacacgctgtatctgcaaatgaacagcctgagagccgaggacacggctgtgtattactgtgcgagagacacagtgaggggaggtcattgtgcgcccagacacaaacctccctgcaggaacgctggggggaaatcagctgcagggggcgctcaggagccactgatcagagtcagccctggaggcaggtgcagatggaggctgtttcctgtcaggatgtgggactttgtcttcttctgacagttccccagggaacctcttaaatttagaaaactgtgcctaacaatgtcttctctatgcatatgaggaccttttctccctggcacaaaatgcagattgacgctgacacggatgaaaattcctcaaccatggtcacaaggatcagagtcctgagtaacctcagggcttcctggtgattcttctccaatcagacccaggacagggacctccgtgagattccctgactggaacagtctttatggatcctggtcacagacaatagagaggctgaaccagggtcagcgtcatgtagaacgtcacagatttcacgtctgatccttctcctgacacgaaagtatgcaaatcagtatcagcaccgatctggtgcttcttttgttcctaatccatttactttcttttttcgtcgtttttctcctttttccatttgtttttcctgctttttgcaaaaggaagatgttttccctgtgagatgcaggggatgacaattttgggagatggctggaacatccaatatcctcagggccgaccatcagtaagtgcaggctagaagtctcagaaagagctgaagctgcttaatcaccgtggagttttaccttctccagttctgctctgatggaatcagggccaagcaggttatcaatgataatctacctaacatagagtcaactgattccagtttcaataacgtctgttaaaaattcacaccaccacctggattactgttttgtcaaatcaatacacagtattgtccagctaagtagacccaaagacggaccgttgcccatggagaaaaacattaacctgagttctaggttcttacagtgttaaaggtgtaaaactgattattaaaaatgaggctatttttctttttgctgttgagttgtagaagtttcttttccattttgacatgaaaactttttcagatatatggcatattatccaattctgtaagttgtagttattttgttgctttgcagaatctttttcataatctattcccacttgttcaattctgcttttttttgtaggtgatttgaatgtaaaatcctgaaaaagattgctaattttttgagtgttgagagttttacaattagaggtattacagttagatatttgaggcatttggagtgaatttttgtgtttattctaacctaaaattcttaattcttttcatgggaaaatccagttttcataccaccctctttggaagacactacaatttagccatgttatattgatggttctcatgctaaaaatcagcttgtcatcaatatgtgggtttatatctaagctctatataggtatttaagccaaaactttctatgtttttaataaatgttgaggcctggaagtgaaatgcctaaagctttcttcttgccttgttacagatattgtaccaaaatattctaaccttttactattgagtgtaataatagctgtggcctttcttaacggcttttattatgttcaagttgttttcttgtcttcctactttgttcatagttttaataatgaaactgatttttttcaaagtctttttctgtgtctgatgaaatgttactgagatattttttctttagttttttaatgtgtaccaaactgattgatttgagaatgttgaatcaagtatgcatctcaggaagaaatttgagttggtcatggtgtatgtcttctaaaacactttggagcttagtttactattgttggggattaattcatgtctactaatgatattggtctgtagtttcctttattgtggtgcctttgtctattactggtaatactatcatggtagtctcatagaaagagtttagaaggtgtatggcagactacctttaaaatagattttatcagtggagaaatggtgatagttttttcttcacttttctgttgggaagaattttatgttgtttaaaagatattcagaatgacttaacctggtttatgagctttcattctattcctttcttccattctttttgaagaactgcttacctttcctatttatttttaagtttgtttttagacatatgcaatacattttgaggtgaaacctggtggaattttttccaataaattagtaaaaataaatcatttaattgactattttattcaggttgatttgtttaatatttgctaaaggccagttctttaagctatgacacataataaatcccaaatggcagtacctcattgtttacttagcttttgtacttatatttttcagaggaagaaccactactgtaaattgtaaatagccaatacataattgtattgtatgcaaatctgtgactgtttacagtgtcatctctgagaaacataaagtttatttactatatatatataaagagtttggaaggtggactccaccaatttttgaaagagttacagaagggctgctattacttctttaaatgttaaggttcattttatgatgtaacagataacctatcatggagaatgttcaatgtgttcttgagaaggatgtgtattacgtgactcttggttggaaggttctgtaaatatcattcagataaatttgttcaatagtgttgttcaagttcagaggcacattgagaattttctttctggatttgctaaacattatggtcatgaggtattaaggtcttgtgttatttttgtattgttttctatttctttatatctcttacagtttgcttaatgcagttatatttgtatttgtacacatgtgtaaaaacaaaaatcataattgctaaatgagttttatggcacagtcacattataagtaatatttttccaaatgctaccattgccactaaagtcctcctggagtctgacgtctgctctgggcactgccttcttctcaggcgtcccacactggagcttgctatagaggaggaggcatgaaaacagggccctccctctcctggtgaaatcaagcccagacctgaccctgcagctctgggagaacagccacagccctgggattcccaggggtttccatttggtaatcaggactgaacacagagaactcactatggggtgtgaattaagctgaatttttcttgttggtattttaaaaggtgactcctagggaactagagtgagtgagagtgagtggatatgagtgagagaaacagtggatatgtttgccagtttctgaccaggatgtgtgtgtattttcaggtgttcagtgtgaggtggagctgatagagtccatagaggacctgagacaacctgggaagttcctgagactctcctgtgtagcctctagattcgccttcagtagcttctgaatgagccgagttcaccagtctccaggcaaggggctggagtgagtaatagatataaaagatgatggaagtcagatacaccatgcagactctgtgaagggcagattctccatctccaaagacaatgctaagaactctctgtatctgcaaatgaacactcagagagctgaggacgtggccgtgtatggctatacataaggtcccaagtgaggaaatatcggtgtgagtccagacacaacatttcctgcaaaaagaagaaaggagtctgggccgaaggggacactcagcactcacaaaacaggtgcagccccaaggcaggtgcagatggagggagggtaagggctgctttccttcagggtctgtggtttcctctgcttctaatatttcccctctgaacctctgtatatttatgttttgtgcccaccatgaggtccctggattagaaaactaatttaaaagaggaaatattctcatatgtcccaaaaacagatgtaagttttggaggcataaaaatgcataggagccgcgtgagtctgtagacactgccaccccacaatgccagacccaaaactagtgctggagaagggtgggagtttgatggagcttccctgatgaccccgtggtccaagctaagtccagcaaggccattggtgcctcgctgagcacagttgtccatcagggatctcccatgtgtcccagcagcagccatgcctcagtatctccactgtgcacagccatcgtctgggaggagctcccaggatgggtgtctttggcacacacaggtgatgggtgttagagtgcagtgcagcagctggctgcctggtctattgggctcctggatattggagggattggaggtgcattctcaaggccagcacgctgtttgttaatttttgtataaaaaccatgtgatttaattcattttctcagatgacatagataattaataacacaatctgcaaacaattgtaattttcaactttaccccaagttcattgtttcttaattctgtgcaggatccagacatggtattgcccttctcatgagaaattgttcgacctaaactgaaaccagttgtttctcatatactttggttctccccacatgcagagatcttgattagagcaagtttggtactttccacgcactcaccctcacctccccagataaagagcagaagttctccttagactgagtctgagggaggagctgttcctgtaccactcagggcctgcggagacccccaggtgcagcttcactgagtcaggtgtttcactccctgtgattgctgctcaggtctaattgtgggctcagaattaggacagtcttcaggttatcacagatcaatcatattctaaaaatcatcattatcacacaccgtggtaataattcaatgttcatttttctaaacagcagtttctcttttttatttggttgcaagtttgaggaaaggagcatgtgataatactttttaatctaacctcaaaatctactgaattgttctaggagactcacaaattggacaagagtgagctccttgtgctcataaaaaatgcatgtatttgggaatttcaccgtgttgtccagaaactgttaacatcaacaactgtgttttccagtgcacttctggcttgagacatcctcacagaccctctccctcacctgcactgtctctggattccccatcataaccagtgtgtcctgctagaattgtatctgcttgcccctagaagatggacaggagtggatcaggttcatgggttgtaaagggagcaaaaattacatcccacttctcaagagtccatatccagatccaagaaacagttcttacagctgagctctgtgcccagtgaacacacaactacacattttgaagcaaaagacgcaatgaagggccttcattgtgagcctagacacaaacctccctgcaggggtgaataggagcagcagggggcattcggggcagtatgggggcttagcatgattgttgggggtcaagatgagcaggatcaaggctcatcatcagggcaagtgcaacagggcagaaaaggggctgtagatgtgggttgttctcaccatcatatttcaccaccagacaccctccactacatctcttctaatgtgtctgagtgttgatatgattagaaaatggcatttatgtaaatactaatgtatacccaaatggaggtgcatccagttgtcctctccatcttatgtggaccttgtccatcaagggctaagttcctgtatttacttgattacctcatacattatggtcaaaacaggtagggtctcattttggcatggtctctcctcctcccttctctctgtcgcacaaaaacacatgaactgacacacacagagcttcccaacttcaattatctgatgtattgaagcaaattgattagtgtgcagcttttctgctttgcctgctattcatgttatgtaaaaataagaaccgtgtgtttctcagcttgttacttctctaagctaagtagcatctttgtttattatacccagagaccaaaagcgattcagctgttattcagcagcttaactggtaaacaaattgtggaaaattcatttactggaataatacccactgttacaatgaagtactgctggatacactcagtaccatgcttaaaataacaagtacctgaataagtaaaataagtcaaacaaataaaagtgcatacatatgattccacttctataatttctataaagtaaaaatgaacttaaagttacataaaaagatctgtagttgactggggacatggtacaagaagagaaggtatagaaaggagaaacgacaggagagcaaaaggaaatttctaggataattttttctctgttagtaaaagtgaggattatgtcactatttgtaaaattgtccactttatgtaaaggttcttatttgctaatttcacctcattaaaatattgcaaattttaaaatatctaatttggtagaaaaggtagtagagagagatgaataaaatacataaaattcagagagtcctgaatacacacatgaatggaccctgggtctcactgtacttttagggagacactagaatacaaaaacataatgacaggatttcagtacatgaaaggagcttctcagaccccaggaggcctgtccaactgcgtctgggagttaactcagggagcaggcatgtcctttggaaggagcaatgacaccaagctcccagcatccattgtagccgacaccatgccaatgccaagagatctcgactaaaattttctgtggatgttgagtgtgattatgccacacactcacaccaagtgagtatggaaaggatagttacctgcatccttaaggtgtctgctgagagcagggcaggtctctcattaaggtccaaagtggcttgatagagcagggaaggagactggctctgggttgttatcatggcttggtggggagcggggcagagcatcctacttgcaggaagggttttgtggggtttcaaggtcaaattggcatcaaatgagggagctcctgtgatttctaactagatttaccttgtatgcttaaaaaaagagatgatggaggaatgagcctgaagttatcagcagtcaggcctaaacacagagtctgatgacttactctaaatagcaagtatacaaatgatgagtaagaaaagagacaagactccaatatgggtggacaacagccaggtctgcagaaaatgagaagactgtttataagcaaagaataatgagtaggatatggaggaggattctggtccaatgtcttgtgtggaagcttctcatgatttgagatcatcagcttattctgaaggtcttaggtcacctgtcttcttcaaaatatcagaagtgcctgatgatatgtgaggatgcacagtttaacttcctctatttgagtagctttacaattgtgtagagttcttaattaattaattttttttttggagacggagtctcactctgttgtgcaggttggactgcagtggtgtgatcataacatagctcacggtgatttcaaattcctggctcatagaatcctcccacctcaacctcctgactagcaagtagctaggtttccagggcccttcatctacacttggccggttcttttcattctttttttttttttttaggtggagtttccctcttcttgcccagactggagtgcaatggtgccatctcagctcactgcaatctccccctcccaggttcaggtgattctcctacctcagcctccagagtagctgggatcacaggcatgtgacaccatgccccgctaatcttgtatttttatcagagatgacatttctccatattggtcaggctggtctcaaactccctacctcaggtgatctttccacctcagcctcccaaagtgctgggattacaggcgtgaggcaccgcaactggcctcttcatttttattcatatgttccttcagcagccactatgtcttcccactgatttcttcagtttctgccttttccttttgaataaggcattattcctaagggaagtcgggaggtgggcctggacagggacttggtgcattcctctctcccgtcccagttcttattggtttctccagtggctgtagaacagcagttttgatggctttacctctgcagataatttctcttgcaatgtagtgctgatggggaggtgtgtctggatgcacttcacctatagttgctgttttgctttcccagacagcaccatcccaaggggtagagggtggagcattttgtgatgtatccccagtactgaagaaaaaggcttcaatagcaggaggaattcctcaactgtatacactctgagaatttaaacaataacttctctatcatactcaaattgaaaccatccaatgaatatgtctactttaatcgtgtgctaacttaaatggcatttggcagcctctgtgccagaaaagattatcatctgctcctgtttatttccctgcaagtccttatctctcttcagatttcagatatattgtttgtcctataacatcaaaaatttgatgtatatgtgctaatttgcagatcagtaagtttagtagctgttgtaagaataataacatatttttatggggtgcttacatctccaagctgagaagcacctctatgtgtaatactaagaaactagaaatgatacaaatatcaagaagatacatagataaaaagtaatggcatgctaatttactgtaataacatccatcatgagaatcaatacattgttgatgctcaacatgtttgcatcataagtagttatgtgcgagaagccacacaaatagaacacatactatataattcctgtataattcttgaaactcaaaactaaagcattaaatatgaaggactgactcagaatatggtggggaagaaaatatttgggaaggaggaattgtagaggaacacaaggaaacttttaagtgtaatttgtttgttcattatttggatggcttttggggatgcaaaggtgagcacgagtggaataacattttgttttgtttgtttgtttgtttttctgaagagatgtggtccttctctgtgacccaggctggagtgtagtggtgggatcatagttcaatgtagcctctaacttctggtctccaacaatactcctgcatctgccatctaagtagctggaactaccgttgtgtgccaggaggtttggcttggcttgagtacttattaaaccacacactttttgcaatatttaatgtatagtaataatgtctcaataagactattacaaatcaatgaatgaataatttgttcagtacagattcatggaaaaatagacactaacatgatgagtgtctgacatttatgaaaatacagctgcatgaaatgtgcttctctttacattcattaggtaaacacaatagtgcatacacatcacaccgtgctttcattacaggaagaaagttctgaaaatgtcactggggtgaaccacacggtgctgggcttggttcagggagcagtcaggcccagtgttgtgaccttcaaccacagaatccttaaaaaaaaaaaaaaaaaaaaaaagaggctgcctcaaagtccgcatcagttcccggactcgctatgtttctggatcgtatcagtgcatccggatctccctggtggctttagtgattccttgcttgccatgctgaggtctcgctgtagattatgttgggttttctaagaccgttttgctattgtaagatccactccctgggacagagcgattccctctaaacctgatagaggttctgaactaaaaataacattaagtgaatcctggtgtgtctgaactcaagtgattgttacattaagctgctgttccaatctgtttcctcacctgggaaaagaggagccaggacatagtgagttgaggccccaggaagataactgaattctcagagggcacagccagcatcctcctcccagggagagtctaaaagactggggcctccctcatcccttttcacctgtccatacagaggcaccacccacatgcaaatctcacttaggcacccacagaaaaccaccacacatttccttaaattcagggtcctgctcacatgggaaatactttctgagagtcctggacctcctgtgcaagaacatgaaacacctgtggttcttcctcctgctggtggcagctcccagatgtgagtgtctcaaggctgcagacatggagatatgggaggtgcctctgatcccagggctcactgtgtgtctctctgttcacaggggtcctgtcccaggtgcagctgcaggagtcgggcccaggactggtgaagccttcacagaccctgtccctcacctgcactgtctctggtggctccatcagcagtggtggttactactggagctggatccgccagcacccagggaagggcctggagtggattgggtacatctattacagtgggagcacctactacaacccgtccctcaagagtcgagttaccatatcagtagacacgtctaagaaccagttctccctgaagctgagctctgtgactgccgcggacacggccgtgtattactgtgcgagagacacaatgaggggaggtgagtgtgagcccagacacaaacctccctgcagggaggcggagggggcgggcgcaggtgctgctcaggaccagcagggggcgcgcggggcccacagagcatgaggccgggtcaggagcaggtgcagggagggcggggcttcctcatcagctcagtgctctccctcctcgccagcacctcagctgtccccaggcctcctctttctttattatctgtggttctgcttcctcacatccttgtggtaggaaaggaaggaggaaggcaaattttcctcttacagtcaaagtgtcactaattactaggaactttcctacaagttcctgaatgtcccatttttccttcttaattaaaaaaaatatatattctaatacttctcaccatctcttgatttgtgtcatcagttgaattgtgctgtctttgaaattcaaatgctgaaaccttaaatccaattgatctatattggaattttaaggatggaattaaggttaaatgtgatcataagtctgagattctaatgcaatagatctgttgtctttataagaagtggaagagtcaccagagacctctcacttttcccgtgcacgcagagaagaggccatgtggagacatagtggactagaaggtgcaagccaagaagaagccgcaccaagaaccaaccctgccagcacctggaccttggacattcagacttcagaatggtgagaaaatcaatgtttgttgtttaagccacccactcctgttgtcttcttatgaagacccagacagactaataccacataactctgttagctcctggagggagaagcagctccctgaggctgggcacatctctcagatatccatatgaagtaggcagaaatagtagttctcatataaaaatgtgtcatggccctgttggccatttttttttgacggagtctcgctctgtggccaggctggagtgcagtggtgcaatctcagctgactacaaaccccgtctcctgggttcaggcaattctccttcctcaacctcctgagcagctgggactacaggtgtccaccaccatgccagcctattttttttttgtatttttagcagagacagggtttcactgtgttagggtggtctcaaatctcctcactgcatgatctgcctgcctcggtttcccaaagtgttgggattacaagtgtgagccaccgcacctggcccctgttggccattcttggggcaatgtctctgaaaccagccctggtgcctgtaccacaaaattttcttttatctttcatgtggatataacaaatggacaatgaggaccagctgcatggagactgaccactgaacatcttctgctgtctcctaagtaagtcacaggaaaacacaccaacatcaccaacataactgttttccttcaacttcctcgaacgaactatagaaatgatcccttaaagtatagtctattccttcaactttctcaatttgcactgaatcccttcctaaattaggagctacatagggtctgagttttgttccctttctcccagtcttccccaagtatcaaggacagaatagatttaaattaaatttggccgtccatgcccccaacaccacatcggtttctaacatccttgtcatgtacccatccttctgtgggcaccccacatcaggttggccaggaatggccagaaggtgtcatcaccttatgggctgaggctacaagttatacacacgtgtgatttcagtcacacacactctactgcaggacacacctgtgttctgaggaactcaggcgcctgctgatctcaggtcttctctaataaattacacacctcttatgaatgaaggtccagatggccccatcagctgcagagcagtggattaaagctcatgggtgggtcagtcaggcagaagtcagacaatgggataatagaagtcagacaatagtcactgaggttcccaatgtattttaatggaataaaacaatattagcaacaaaggggcagtaaagaagactggctcttgaaggtatttaaggaccaggaactttatttggggggaaagtgagagacacttttacatggaaagccctaaagcacatacagcagctgacagagtggccactgtgcacatgagggctgaggagacggatgataggttacgttgctccaagatgtccctgggtgtgtgatggttggactcctcatgcatatgaaaataagagctggactcagggagaaacaagggccataccccatagaaaaggaagaaaaaaagcagatgggcacccctggagagagctcattagatttggtaggtttgagatgaaaattacttccaaaggttttaatgttctaagctaaatatgaatctcttcaataaagtgagaattaaaagaagaatggagctaggagttgagagaggaaacaaattatgagagagcagaaagcaaatccacccaaactgtcacatgacagaggccagaatggagctgatgcagctacttcactattctgcagacctagttgaccatgtggagaaggggttcgaacaaacggggatgttctccaaccttccaaaacaacctccttcttatgcatatgcagtaatcatgattctcagggtggccttcccaagtttcctgttcttacctcttcccccaggggtagagtgtcttttccaacccacagtggtttctctgccatgtcctcagcttctcctccattgtacttaacctgaagattaaggatttcatctggatggagtttcctgggaatcctctgttttctttggtttctgatgaccacatcacaggccataggacacaggttttagtggatttcccctggagacagtggaggtgaatccaggcgttccacagtccttaccgttcttctcttcctgtcagcaccgcaggacagcagataagggagctgactgtggatttttcagatccccgggaaaaagcctgcaaggactaatagtttcacatctaacaccattagcacatgcatccaaaattaaaaaaaaaatcctcactaaatatttccaggttagcctgttcctctctcaataccataccgtggcacctgccctgggttcggtaacatgtgggccccagtcctctctgtaggcgtctgcctcctcagatttcagtcctcttttttgctccgtgaaagcaactcagatatgttaaaaggttttcttcttcatttattcataatttttcaggtttgttgttaatgaggaaagagtaagatcatggtttcctcatttttcacattcccatactgagtaactgctctctctctatgaaagccagaaattaagagaacaactcaagtatccatatccattacaagtgaatgttagacaatttgatgtatgattatgaactaaagtacaacacaggattagaatccaggcatcctcattctcataaaatcatggctgcattcacaaataactgtgctgagtgaaagtagctaacaaattaacagtgcacttcataaacttctatttgtataaactgcagaaggtacagctattctaaagcaacagagaagattacatattggtgggaactgggttttgaaagtaatggggtggtgagatgaaattacagagaagtgacacaaagatttaggtgtgaattgtacacaaattaattgaagctctgattaaagggttgcacacatgttaccattttccaaattatgcagtatatatttgaattaattattaattgtatttaaataaagcagtaacaaagaaacaaatgaatacatttattgaggtggagccaaaactaaatgggaatgaacactcgaaacatctctgactcttgaaaatacacaagcgtgaacactggttctctctatgtatttcaggtcaatagcagaatacactaaaagaaaacagagatgtcctggcaggggtggaatcctgcagacctcactaggcatgtctcacactgccctggagttgtctcaggggagcagtctcctctagtggtcagaggcacaggccgagataatggggctaactctgtccagctgtgtgaccttgaatgcattgtataaacactctgttctctgtgtgatttatcttccttaaaatgtgacattgacacttgcattaaatgtattctacaaatatgtcaaaaagatgatgactgctaaatgattatcaaggcacaatcatataatataatgatattttcctgagtgataagatgactaccaatctcccccagggcactttgtctgctctgagccctgcacctcctcaggattcccatcccagagcttgctatacagtaggagacatgcaaataggtttctccctctgctgatgaaaaccagcccagtcctgaccgcacagctctgggagagaagcgccagccctgggattcccaggggtttctatttggtgatcaggactaaagacagaggacccaccatggagcttgggctgagctgggttttcactgttgctgttttaaaaggtgaactagagagattgagcgtgagtggatacccttgagagaaatggtggattatgtctgggagtttctgaccaggatgtctacgagtttgcaggtgtctagtgagaggtacagctcgtggagtccggagaggacccaagacaacctgggggatccctgagactctcctgtgcagactctggattaaccttcagtagctactgaaggaactcggtttcccaggctccagggaaggggctggagtgagtagtagatatacagtgtgatggaagtcagatatgttatgcataatctttgaagagcaaattcaccatctccaaagaaaatgccaagaactcactgtatttgctaatgaacagtctgagagcagcgggcacagctgtgtgttactgtatgtgaggcaccaggtaagaagacatcagtgtgaacacagacacagtttcctgcaatgataagggaggaggctgggctaaaaggggcactcaggacccactgaaaacgggcagctctagggcaggtacagatggttatcatgggctgctttccttcggggtctgtggcttcctctgcatctaccagttcccctcggagcctctggacatttatgtttctgtggccacccctgacatctctggattagaaaagtttattataggaagaggaaacattttcatttgtcccaaagcagatgtaagtaatggaagcaaaaaatgcacaggaggccaggtggggctgtagatactgtcaccccagaatgtcaatctcaccactagtactggagaggcatgggagtttgatggagcttccctaacaactctgtcttccaagataagtccagcaagaccattggtgcctcccagagcacagttgtccatcagggatgtccaatgcttcccagcagcagccatgcctcagtgtctccactgtgcacagccactgtctgggaggagctcccaggatgggtgtctttggcacacaccaggtggcgggtgttaagagtgcagtgcagcagctggctgcctggtctattgggcctgatgctggagagatgggaggtgcattcttggggccagcatgctgtttgtgaatttttatataaaaactctgattttacttcattttcgcagatgacatagataactaaaaacagaatctgcaaagaaattgtaattttcaactttaccccaaattcattgtttcttaattctgtgcaagatccagacatattattgccttcctcatgataatttattctatgtaaaaccgaaatcattttttctcctactctttgtttctgttcaagtacagagatcttgagcaaagtaagttgggttctttccacacactaaccctcaccttccccagagaatgagcagagattgtcctcagtctgagtctaagggaggagctgtttctgcacaactcagagcctgcagagacccccaggtgcagcttcagtgagtcagacatttctccatgtgggcgacctccagtgcctgtgactgctgctcaggcctaattgttggttaagcattaggacactctttaggtgatcacatctcaagcctattctgaaaatcaccatgatcagagatagttcaatggccattctcctaacataagtttctctttattacttggttccaagtatggagaaaaatgtgaccctatatttgtctgaatccaacatcagcatcaactgcattatgctaggagactcactaattgagcacaagtgagctcgttattctcatagaaatgtaagtatttggaaatttcagtgtgttctccagaacctgtggctgccaacaactgtatttctcggtgcactcttggcctggtgaagccttcacagaacctctccctcacctgtgccatctctgcattctccatcacaaccagtgtttcctgctggagctgcatccatcagcgcccccatgggaggtactggagtggatcgggtgcataggtcatggagggagcacaaattactcccctcttctcaagagtccagtcaccatctccagatccatgtccaaaaagtagttcttcttacagctgaactatgtgaggaacaaacacatagccatgtattttagagcaaaagacacagtgaggaaaccacagtgtgaactcatacccaagcctccctgtgggggtgcataggacagccagggttactcaggacaccaggctccctcaggacaccaaggggcactcaagaccattgtagaggcatgcaggtagctgggggctctcaggaaccatgggggaaaatcaggacaccaatgggtgcttggtacagcggggggctcaggattattgtggcgattcagaaagagcaggtccaaggctcaacctcagggcatgtgcagctggtgtgaaaaggagctggatgaggcgttttgtgtcaccatcatgtttcaccaccagacaccctccactacctctattctaatgcatgtgtttgtatgattagaaaatgatattgatataaatatataaccatagctaggtgtgtcaagttgtcctctccatcttatatcagccttgtctgtaaggactaattccccataattacttgagaacctcataaattgtggtcaattatgtaggattcctctctttttctgccttccttcctccctccttctctctctcacacagaaacttatatacagccaccccacaacacacataaatctataacttttattacctgatgtattgataagtaatctaaagttacataaaaatcagtagttcactgtcaatattgtaggagaagggaaggtctaggaaggaggaattacagaacaagaggatattttgagggtaattgacttgttatctatgtggataatgataatgtctgtgaccatatttgtaaaattgaacacttcgtgtggagactattatttttttatttaaccccatgccattattttgccgtattctagcatttctctaaaaatacagaaatgttcagcactcattcatgtgtatattcaggagtttctgacttttcatgtattttatttatctctgtctaattgctttgataccaaattttacctagtataattagtactacctttagcactgattataagtctcactcctccatcatctccttttttgccacacaagctgaatctagtttggactcataggagctgcttcattcaatgccagtggttgtttcaaaccctatcaacccccctacaaactgtcattaagaaagtttatcaaactccaccagtcatgtgatattagttcgttttcacagtggtataaagaactacctgagacgaggagtttacaaagaaaagaggtttagttgactcacagtgctgcatggctagggaggccacaggaaacttataatcatggtggaaggtgaaggcgaagcacggcacatcacacagcgcagcaggagagagagggggaagtgacacatacttttaaactatcagctcttgtgagaagtcactcactatgatgagaacaacatgggaaaactgccctcatgatccaataacctctcacctggtccctcccttgacatgtggggattagaatttgagatgatatttaggtggggacacaaaacaaatctatagcacatgtccagctgtgtcctggagttgtttcagggatccagtgtgtactgttgatagaaacagtgatcatcattctagctggtgtgagatggtatctccttgtggtttagatttgcatttctctgatggccagtgatgatgagaattttttcatgtgtcttttggctgcataaatgtcttcttttgagaagcgtctgtgaaaaaaaaaaagaaacagtgacaccaagctcacaccatccgttgtagttgacaacatgcaaagccaagagatctcaactgagatttagtgtgtgtgtcatgtctgatgaagtcataagctcagagcaagtgaatatggaaaagtgtattatctgcacagtgtaggtgtctgctgagtgcagggcaggtctcacaggaaaatctaaaatggcttgaaagaagaggaaaggagactggctcagggtttttataatggtttagtggtggcggcagagtgaggcttcccactcacagatcggggtttataaggtttgaaactcccactgccattgaatgaagaagctcctgtgagtccaaactagattcaccttgtgtggcaaaaaaggagatgatggaggagtgagccttaagtaatcaacaggcatgcaccaaaagatagagtgacaacttattctaggtagcaagaataaaaataatgaaaaagaaataagggttcagtatcgatggacaagacccagatctacagaaatgagatgactttagaaatataaggaaataataatgagagaaagaaggaggggatggggaattagggtcctggccgaatgtcttgggtagaagcttctcacaatcaaggactatcagcttattctgcaggtcttaggtcacacgtctgcttaaaaacatcagaaatgccaggcaatcaatgaggatgctcagtttagcatctcctatttgagtagatttacagttgtgtggaattcttaattgattctttttggtttgtttttagaggcaggctctcacactgttccacagcttaaagtacagttgtgtgatcatagctcactgtaattttgacctccagactcacgtaatcttcctgtatcagcctcctgagtatctagaattagaggggaatgccacccctcacctgcttattctttaaaatattttttcatagaaatagcatctctttatgttgcccaggttggcttcgatttcctggtctcatgtgatttccctcactttgcttctgaaagtggtgtgattatagggaagatccactgcatctgtcctgaattgattctttacttgtaaaacatgaagccaataattaactgcctgactgttttgtgcagtgagttagttaaaagtttctgataagattccttccaatatgattcaagagcagtattttctgccgatattcctttcagtttccttgttgaagatcagaagacactgcggaaaagatgtagtaaaaaggcagttttaactcttcatgattggagtggatatcacataggaatccctttccgtattttgtaacacatgcatgcaatagaacaaagatgatcccttggtgtaaaatctataaacgtatgggccttttagctaccaagtcatagggtaataactgatggaccctgaggagtgaaccatgattccatagtgctagtgggagaacccttggccaaggaagttcacattttattaaaattgataatttttatgtagggatgccattttttaaacattcccagaaggttgtgagtgggattgactctgtcttctgtgaacaatgacagtgccctccatggttagataatattttaaactagattgagctagaatggttgctgtattgaatcactatatttttttagcttcatgttagctttttgtgtgttagcatttgctttaaaatgatattaatcagccctctagtaggtagaaattcatctgagggtttcttcccttgttgtccatctcaataggatttccagaagacgtaagaaccctctctgtttctaaaaatattccaggctgggcgctgtggctcatgcctgtaaacccagcactttgggaggccgaggtgggtggacccctcgaggttgggagtttgagaccagcctggtcagtatggtgaaacctcatttctactaaaaatacaaaaattcgccgggcatggtggtgtacactcgtaatcccagctacttgagaggctgaagtgagaggattgcttgaaccctggaggcgggggtcgcagtgagccgagattgtgccactgcacttcagcctgggcgacacagcgagactccgtctcaaacaaaacgacacaaaaaattccaaagttgtgcaccctctaaaagcatacgtacttaattctcatttttaatttattaaacatctctaataagttcaatgtttcctgccttctgagttgatttcctaacacatagaagaatatatcctaaatgaaagtttgtgttcttaatagaaattactagttaataacctttacttttattattgaggtattatacatcaatgttaatcctctcaatgggactcttacctaaagaatatataaaatattttcctgatcatgacataaagtagatgtgaacacattcttagcattcagccatgtctcttgtctattaatattataaaccacatgctaactttgattttattggtaattgttctaatttctttttttttcccacttctctggttgtttttttttttaactttaagttttagggtacatgtgcacaatgtgcaggttagttagatatgtatacatgtgccatgttggtgtgctgcacccattaactcgtcatttaatattaggtatatctcctaatgctatccctcccccctcccctcaccccacaacaggccccggtgtgtgatgttccccttcctgtgtccatgtgttctcattgttcaattcccacctaggactgagaacatgtggtgtttggttttttgtccttgcgatagtttgctgagaatgatggtttccagcttcatccatgtccctacaaaggacatgaactcatcattttttatggctgcataggattccatggtgcatatgtgccacattttcttaatccagtgtatcattgttggacatttgggttggttccaagtctttgctattgtgaatagggaattgttctaatttcaaactagttaatttttatcttcatgcagctagattattatgtgtggctatttattccgagagtgataaagacaacattaacaattttcactgcaggcatgtctaggcaactccctgtgcactatgaccctggggcgttggagattctatggggactcttccctacctgcctaggagagttctctgccttctacctctagcattttcctctttgaagaagtacatctaactgtcattagaatagagacaaagacaagtcttaactgcttccagctgaggagggatgctgtttggggaagatctctcttggaggtctaagggaccccaggaaaagggagccattatcccaggcttcagttgcatgaccatttggagtttgatggtctgaaaatgagaagaggcaaatctggttattagaagacatgtatgaaaaccaaacaaggtggcaaggacagcttgaaagaaaattccaaggctgctgacattcctagataactgcagctgtagttatgcctgctaaggtttgggcgcatggggcttggcttttgtcagctccctgggatttattttcccaaacaaagaaacctccaggttaggggcaccctattcattcccatcacctggcatgatttaaaggataattgcttagaattaaaatattgatccagattttttatattccccatcgctttttgtttcttctgggctgtagccagagatcattgattggcgctcaggaataagcagagttagtctaaaatgcaggcaaatacttaaacaactgaagagattagaatttaaagacaagtgtatgatatgttttgaaatacaatgtttctctttccagttttggtttttgtcagcagcaaataatgataagactgagttgtttgcaaaataaactttagtcttaaacttggcctgattatttgcataaagtgcagcaagaatattaataataattctgtaggaaaagcctgcaagcaccaggagcttcacagtctaacactatgagcacgtgcatcctcacgcaactcactgaatatgtccaagtcagcctgttccgatcttaaatgccatccagtggcatctgccccaggtacactaatacatgggtcctgcttctctctgcagccgcctctctcctcagatttcaggttttgtgtattgtttgttttctctctgacatcaacacagatatgttgaaggttttcttttttttatttgtagttgttcagctttgttgttaatgaggtcagaataagctcatagtttacacatttttacattcccatgccgagtagctgcttttctctatcaaatccattaactgagagaacaatcacatttcgttacaggtgaacagttaaatagtttggcatatatttctgtgctggaatctaatgcagcttgaaatcaagtcatgcctcactcattgaaaaaaacatggctaaattctcaaagaattgtgctgagtgaaagaaactaaggaatgaagagtaaattttatatgatacatttgtagaaattttagaagatgccactattataaattaacatggagaagatttaaatgtttctgagaatatgctattgggagtaatggggatgtgagttaaatttcagaggaataagagaaagatttagggattaatttattcaaaccttgattgaagtgctgagtaaatggttgcaaacataggtctacatttttcaaatcattcaccataaatttgaattatttattaattacactcgaataaagcaataaagaaactgatgagataatatttgactgaattgcagcaataaatagatcgatattaacacaaggaatataactgacttccaaaaacatacacatgaaccgtggttcactctgcgtatttaggtaaataacagaaagttgtcataacagatggggaatcctgcagacttcactaggcatgggccatgctgccctggagttgtctcaggggagctgcctcctccagaggttagagcacaggcccaggtaataggactaaatttttagatgtgttatcttagacacactgcacaactgctgtgttctctatgtaaattatctcctgtaaaatataacattgaagcctgcattaaatatattgtgtaaatatgtaagaataaaagaaagttatgagagctaagtgttaatcaaggcacaagcatataagatataactatattttcctgaatgatggaattactaccagtctcccccaggacacttcatctgccctgagcccagcctctcctcagatgtcccacccagagcttgctatatagtgggggacatgcaaatagggccctccctctactgatgaaaaccagcccagccctgaccctgcagctctgggagaggagcccagcactagaagtcggcggtgtttccattcggtgatcagcactgaacacagaggactcaccatggagtttgggctgagctgggttttcctcgttgctcttttaagaggtgattcatggagaaatagagagactgagtgtgagtgaacatgagtgagaaaaactggatttgtgtggcattttctgataacggtgtccttctgtttgcaggtgtccagtgtcaggtgcagctggtggagtctgggggaggcgtggtccagcctgggaggtccctgagactctcctgtgcagcctctggattcaccttcagtagctatggcatgcactgggtccgccaggctccaggcaaggggctggagtgggtggcagttatatcatatgatggaagtaataaatactatgcagactccgtgaagggccgattcaccatctccagagacaattccaagaacacgctgtatctgcaaatgaacagcctgagagctgaggacacggctgtgtattactgtgcgaaagacacagtgaggggaagtcattgtgcgcccagacacaaacctccctgcaggaacgctggcgggaaatcagcggcagggggcgctcaggagccactgatcagagtcagccctggaggcaggtgcagatggaggctgtttcctgtcaggatgtgggactttgtcttcttctgacagttccccagggaacctcttaaatttagaaaactgtgcctaacaatgtcttctctatgcatatgaggaccttttctccctggcacaaaatgcagattgacgctgacacggatgaaaattcctcaaccatggtcacaaggatcagagtcctgagtaacctcagggcttcctggtgagtcttctccaatcagacccaggacagggacctccgtgagattccctgactggaacagtctttatggatcctggtcacagacaatagagaggctgaaccagggtcagcgtcatgtagaacctcacagatttcacgtctgatccttctcctgacacgaaagtatgcaaatcagtatcagcaccgatctggtgcttcttttgttcctaatccatttactttattttttcgtcgtttttctcctttttccatttgtttttcctgctttttgcaaaaggaagatgttttccctgtgagatgcaggggatgacaattttgggagatggctggaacatccaatatcctcagggccggccatcagtaagtgcaggctggaagtctcagaaagagctgaagctgcttaatcaccgtggagttttaccttctccagttctgctctgatggaatcagggccaagcaggttatcaatgataatctacctaacatagagtcaaccgattccagtttcaataacgtctgttaaaaattcacaccaccacctggattagtgttttgtcaaatcaatacacagtattgtccagctaagtagacccaaagacggaccgttgcccatggagaaaaacattaacctgagttctaggttcttacagtgttaaaggtgtaaaactgattattaaaaatgaggctatttttctttttgctgttgagttgtagaagtttcttttccatttggacattaaaactttttgagatatatggcatattatccaattctgtaagttgtagttacttggttgctttgcagaatctttttcataatctattcccacttgttcaattctgctttttttttgtaggtgatttgaatgtaaaatccagaaaaagattgctaattttttgagggttgagagttttacaattacaggtattaaagttagatatttgaggcatttggagtgaatttttgtgtttattctaacctaaaattcttaattcttttcatgggaaaatccagttttcataccaccctctttggaagacactacaatttagccatgttatattgatggttctcatgctaaaaatcagctcgtcatcaatatgtgggtttatatctaagctctgtataggtatttatgccaaaactttctatgtttttaacaaatgttaaggcctggaagtgaaatgcctaaagctttcttcttgccttgttacagatattggaccaaaatattctaaccttttactattgagtgtaataatagctgtggcctttcttaacggcttttattatgttcaagttgttttcttgtcttcctactttgttcatagtttttataatgaaactgatttttttcaaagtctttttctgtgtctgatgaaatgttactgaggtattttttctttagttttttaatgtggtgtaccaaattggttgatttgagaatgttgaatcaagtatgcatctcaggaagaaatttgagttggtcatggtgtatgtcttctaaaacactttggagcttagtttactattgttggggattaattcatgtctactaatgatattggtctgtagttttcttttattgtggtgcctttgtctattactggtaatactatcatggtagcctcatagaaagagtttagaagatatatggcagactacctttaaaatagattttatcagtggagaaatggtgatagttttttcttcacttttctgttgggaagaattttatgttgtttaaaagatattcagaatgacttaacctggtttatgagctttcattctattcctttcttccattctttttgaagaactgcttaccttttccttttaatttttaagtttgtttttagacatatgcaatacattttgaggtgaaacctggtggaattttttctaataaattagaaaaaaataaatcatttaattgactattttattcaggttgatttgtttaatatttgctaaaggccagttctttaagctatgacacataataaatcccaaatggcagtacctcattgtttacttagcttttgtacttatatttctcagaggaagaaccactactgtaaattgtaaatagccaatacataattgtattgtatgcaaatctgtgactgtttacagtgtcatctctgagaaacataaagtttatttactatatatatataaagagtttggaaggtggactcctcaccaatttttgaaagagttacagaagggctggcattacttctttaaatgttaaggttcattttatgatgtgacatataacccatcatggagaatgttcaatgtgttcttgagaaggatgtgtattacgtgactcttggttggaaggttctgtaaatatcattcagataaatttgttcaatagtgttgttcaagttcagaggcacattaggaattttctttccggatttgctatacattatggtcatgaggtattaaggtcttgtgttatttttgtattgttttctatttctttatatctcttacagtttgcttaatgcagttatatttgtatttgtacacatgtgtaaaaacaaaaatcataattgctaaatgagttttatggcacagtcacattataagtaatatttttccaaatgctaccattgccactaaactcctcctggagtctgacgtctgctttgggcactgccttcttctcaggcatcccacactggagcttgctatagaggaggagggagggcccctctcctggtgaaaacaagcccagacctgaccctgcagctctgggagaagagccacagccctgggattcccaggggtttccatttggtaatcaggactgaacacagagaactcactatggggtgtgaattaagctgaatttttcttgttggtattttaaaaggtaactcatagggaactagagtgagtgagagtgagtggatatgagtgagagaaacagtggatatgtttgccagtttctgaccaggatttgtttgtattttcaggtgttcagtgtgaggtggagctgatagagcccacagaggacctgagacaacctgggaagttcctgagactctcctgtgtagcctctagattcgccttcagtagcttctgaatgagcccagttcaccagtctgcaggcaaggggctggagtgagtaatagatataaaagatgatggaagtcagatacaccatgcagactctgtgaagggcagattctccatctccaaagacaatgctaagaactctctgtatctgcaaatgaacagtcagagaactgaggacatggctgtgtatggctgtacataaggttccaagtgaggaaacatcggtgtgagtccagacacaaaatttcctgcaaaaagaagaaaggagtctgggccaaaggggacactcagcactcacaaaacaggtgcagccccaaggcaggtgcagatggagggagggtaagggctgctttccttcaggatctgtggtttcctctgcttctaatatttcccctctgagcctctgtacatttatattttgtgcccaccatgaggtcgctggattagaaaactaatttgaaagaggaaatattctcatatgtcctaaaaacagatgtaagtattggaggcataaaaatgcataggagccgggtgtgtctgtagacactgccacccccaatgccagacccacaactagtgctggagaagggtgggagtttgatggagcttccctgatgaccccgtggtccaagctaagtccagcaaggccattggtgcctcgctgagcacagttgtccatcagggatctcccatgtgtcccagcagcagccatgcctcaatctctccactgtgcacagccattgtctgggaggagctcccaggatgggtgtctttggcacacacagttgatgggtgttagagtgcagtgcagcagctggctgcctggtctattgggctcctggatattggagggatttgaggtgcattctcagggccagcacgctttgtcaatttttatatgaaaaccatgtgatttaattcattttctcagatgacatagataattaataacacaatctgcaaacaattataattttcaactttaccccaagttcattgtttctgaattctgtgcaggatccagacatggtactgcccttctcatgagaaactgttcgatctaaactgaaaccagttgtttctcgtatactttggttctccccatgtgcagagatcttgattagagcaagtttggtactttccacgcactcaccctcacctccccagataaagagcagaagttctccttagactgagtctgagggaggagctgttcctgtaccactcagggcctgcggagacccccaggtgcagcttcactgagtcaggtgtttcactccctgtgattgctgctcaggtctaattgtggctcggaattaggacagtcttcaggttatcacaggtcaatcatattctaaaaatcatcgttatcacacaccatggtaacaattcaaggttcatttttctaacggcagtttctcttttttatttggttgcaagtttgaggaaaggaacatgtgataatactttttaacctaacctcgaaatctactgaattgttctaggagactcacaaattggacaaagtgagctctttattctcataaaaatgtgtggttttgggaatttcactgtgttgcccagaacctgttaacatcaacaactatgtttctcagcacacttctggcttgagacgtccttgcagaccctctccctcacctgcactgtctctggattccccatcataaccagtgtttcctgctagaattgtatctgcttgcccctagaagatggacaggagtggatcaggtgcatgggttgtgaagggagcacaaattacaacccactgctcaagagtccatatccagatccaagaaacagttcttacagctgagctctgtgcccagtgaacacacaactacgcatttttaagcaaaagacgcaatgaagggccttcattgtgagcctagacacaaccctccctgcaggggtgaataggagcagcagggggcattcggggcagtatgggggcttaggatgattgttaggggtcaggatgagcaggatcaaggcttcgcatcagggcaagtgcaacagggcagaaaaggggctgtagatgtgggttgttctcaccatcatatttcaccaccagacaccctccactacatctcttctaatgtgtctgagtgttgatatgattagaaaatggcatttatgtaaatactaatatgtacccatatggaggtgcatccagttgtcttctccatcttatgtggaccttgtccatcaagcactaagtccctgtatttacttgagtacctcacacattatggtcaaaacaggtagggtctccttttggcatggtctctcctcctgccttctctcttctgtcacacaaaaacacgtgaactgacacacacacagagcttcccaactttaattatgtgatgtattgaagcaaattgattagtgtgcagcttttctgctttgcctgctattcatgttatgtaaaaataagaaccatgtttttctcagcttgtcacttctctaagctaagtagcatctttgtttattatacccagagaccaaaagcgatccaactgttattcagcagcttaactggtaaacaaattgtggaaaattcacttactggaatcatacccactgctacaatcaagtaatgctggatacacccaacaccatgcttaaaatagcaagtacttgaataagtaaaataagtcagacaaataaaagtgcatacatacgattccacttctataatttctataaagtaaaaatgaacttaaagttacataaaaagatctgtagttgactggggacatggtacaagaagagaaggtatagaaaggagaaactacaggagaacaaaaggaaatttctaggataattgatttttttctctgttagtaaaagtgaggattatgtcaatatttgtaaaattgtacactttatgtaaagattcttatttgctaatttcacctcattaaaatattgcaattttttaaatgtctagtttggtagaaaaggtagtagagagagatgaataaaatacataaaaatcagagagtcctgaatacacacatgaatggaccctgggtctcactgtactttgagggagacactagaatacaaaaacataatgacaggatttcagtacatgaaaggagcttctcagaccccaggaggcatgtccaactgcgtctgggagttaactcagggagcaggcatgtcctttggaaggagccgtgacaccaagctcccagcatccattgtagccgacaccatgccaatgccaagagatctcaactaaaattttctgtggatgttgagtctgattatgccacacactcacaccaagtgagtatggaaaggatagttacctgcatccttaaggtgtctgctgagagcagggcaggtctctcattaaggtccaaagtggcttgatagggcagggaaggagactggctcagggttgttatcatggtttggtggggagcggggcagagcatcctacttgcaggaagggttttgtggggtttcaaggccaaattggcatcaaatgagggagctcctgtgatttctaactagatttaccttgtatgcttaaaaaaagagatgatggaggaatgagcctgaagttatcagcagtcaggcctaaacacagagtctgatgacttactctaaatagcaagtatacaaatgatgagtaagaaaagagacaagactccaatatgggtggacaacagccaggtctgcagaaaatgagaagactgtttataagcaaagaataatgagtaggatatggaggaggattctggtccaatgtcttgtgtggaagcttctcatgatttgagatcatcagcttattctgaaggtcttaggtcacctgtcttcttcaaaatatcagaagtgcctgatgatatgtgaggatgcgcagtttaacttcctctatttgagtagctttacaattgtgtaaaattcttaattaattaatttttttttgagacggagtctcactctcttgtgcaggttggactgcagtggtgtgatcataacatagctcacggtgattttaaattcctggctcatagaatcctcccacctcaacctcctgactagcaagtagctaggtttccagggcccttcatctacacttggccggttctttacattctttttttttttttttttaggtggagtttccctcttcttgcccagaccggagtgcaatggcgccatctcagctcactgcaatctccccctcccaggttcaggtgattctcctacctcagcctccagagtagctgggatcacaggcatgtgacaccatgccccgctaattttgtatttttagtagagatgacgtttctccatgttggtcaggctggtctcaaactccctacctcaggtgatccttccacctcagcctcccaaagtgctggaattacaggcgtgaggcaccacacctggcctcttcgtttttattcatatattccttcagcagccactatgtcttcccactgatttcttcagtttctgccttttccttttgaataaggctgttactcctgagggaagatgggaggtgggcctggacagggacttggtgcattcctctctcccctcccagttcttattggtttctccagtgtctgtagaacagtggttttgatggctttacctctgcagataatttctcttgcaatgtagtggtgatggggaggtgtgtctggatgcatttcagctgtagttgctgttttgctttcccagacagcaccatcccaaggggtagaggctggagcattttgtgatgtatccccagtactgaagaaaaaggcttcaatagcaggaggaattcctcaactgcatacactctgagaatttaaacaataacttctctatcacactcaaattgaaaccacccaatgaatatgtctactttaatcgtgtgctaacttaaatgacatttggcagcctctgtcccagaaaagattatcatctgctcctgtttatttccctgcaagtctttatgtctgttcagatttcagatatattgtttgtcctataacatcaaaaatttgatgtatatatgctaatttgcagatcagtaagtttagtatttgttataagaatagtaacatatttttatggggtgcttacatctccaagctgagaagcacctctgtgtaatactaagcaactagaaatggtacaaataccaagaagacacatagataaacagtaatggcatgctaatttatggtaataacatccatcattagaatcaatacattgttgatgctcaacatgtgtgcatcataagtagttatgtgcgagaagccacacaaataaaacacatactatgtaattcctgtataataaattcttgaaactcaaaactaaggtattaaatgtgaaggactgactcagaatatggtggaggaagaaaataattgggaaggaggaattgtagaggaacacaaggaaacttttaagtgtaatttgtttattcattatttggatggcttttggggatgcacaggtgagcacgagtggaataacattttgttttgtttgtttgtttgtttttttctgaagagatgtggtcctactctgcgacccaggctggagtgtagtggtgggatcatagttcaatgtagcctccaacttctggtctccaacaatactcctgcatctgccatctaagtagctggaactaccgttgtttgccagcaggcttggcttgagtacttattaaaccgcacactttttgcaatatttaatgtatagtaataatgtctcaataagactattacaaatcaatgaatgaataatttgttctgtacagatttatggaaaaatagacactaacatgatgaatgactgacatttatgaaaatacagctgcatgaaatgtgcttctctttacattcattaggtaaacacaatagtgcatacacatcacaccgtgctttcattacaggaagaaacatctgaaaatgtcactggggtgaaccatattgtgctgggcttggttcaggaagcagtcaggcccagtgttgtgaccttcaaccacagaatcctaaaaaataataaaagaggctcccccaaagtccccatcagttcctggactcgccatgtgtctgggccgtatcagtgcatccggagctccctggtggctttagggattccttgcttgccatgctgaggtctcgctgtagattatgttgggttttctgaggccgttttgctatttaagacccactccctggcacagagcgattccctctaaacctgatagaggttctgaactacaaataacgttaagtgaatcctggtgtgtctgaactcacatgattgttacattaagctgctgttgcaatctgtttcctcacctgggaaaagaggagccaggacatagtgagttgaggccccaggaagataactgaattctcagagggcacaaccagcatcctccttccagggagagcctaaaagactggggcctccctcatcccttttcacctctccatacagaggcaccacccacatgcaaatctcacttaggcacccaagggaaaccatcacacatttccttaaattcagggtcctgctcacatgggaaatactttctgagagtcctggacctcctgtgcaagaacatgaaacacctgtggttcttcctcctgctggtggcagctcccagatgtgagtgtctcaaggctgcagacatggagatatgggaggtgcctctgagcccagggctcactgtgggtctctctgttcacaggggtcctgtcccaggtgcagctgcaggagtcgggcccaggactggtgaagccttcggacaccctgtccctcacctgcgctgtctctggttactccatcagcagtagtaactggtggggctggatccggcagcccccagggaagggactggagtggattgggtacatctattatagtgggagcacctactacaacccgtccctcaagagtcgagtcaccatgtcagtagacacgtccaagaaccagttctccctgaagctgagctctgtgaccgccgtggacacggccgtgtattactgtgcgagaaacacagtgaggggaggtgagtgtgagcccagacacaaacctccctgcagggaggcggaggagccggcgcaggtgctgctcaggacgagcagggggcgcgcggggcccacagagcaggaggccgggtcaggagcaggtgcagggagggcggggcttcctcatcagctcagtggtctccctcctccccagcacctcagctgtccccaggactcctctttctttattatctgtggttctacttcctcacatccttgctgcaggttttaacagtcactggcacccttttttcaacaaattcccacaaggcccattttaccttcttgacaagcaaaatattctaaggcttctcactatcccttgattggcgtcatctactgcatcgtgtctttctcttaaattcatgtgatgaaaccccaatcccagtggctctgtattggacagagggattttaagagggcaaataagttaactgtggccataaatgtgggaccctaatccagtaggactcttgtccttatgagaagtggaagacatcagaggcctctctctccacatgcacacagaggagagtccatgtggggatgcgctgcatgagaaggtggccctttgcaagcctggaagaggcctctcaaaaaacttaccctttctgcacccagatcttggacgtcaagactccagaacaataagaaaattaatatttgttatttgaaatagcctagtctgtggtatcttctcatggaaagccaagtagattcagagattcaattgtgttagctccgtctcctgcatggagtagcagcccaccgaggctggacacatctctcaaattattttcataaagaaaaatagatccaagatgaaaaccccaccacatttctgctgagccattcacttagcagcagtctctgagatcagccctgggggtatgttctaggtcgtgtatctcactttccactatgagaatccatgtagataatgagaaccagccagatggagtcctgatccctgcccaccttctgcttccccccaagtgacacacggtcacagaaaaccactccagcatcaccctgtgtcttgtactctctaaaatcccactaaagctgaccctaaactaggagctatttggggctggactcattctgttcttagtcttccataaggtccaggtgccgagtagagcctcagtaaagagtgagcttcaattcccctaacccacatcattcccttacatccttgtcatgcacctgtcctctgcaggcacccagggcaggttacacaggaattgcctgaagctggtctcaggtgccctgctgagaccactggttatgcacacgtatgatttcaggtcatgcaggctcttctgcaggacagacctgtgtcctgtagagcacagacacttggtgacccagggcctcctctaataactcatacatctcatgtcagtgtatatccaggtggcccctcagtgcagcacactagggtgattaccctcacaggtggctttttcaggcggtgaacagaaaatggggtgggcacgctggtcattcccatcatcggtgatatccaagtgaattttaaataaatgaaacaaaactaacaacaaaggggaaggatatgtacctgtatctgggaggtagactgggtcccagaactgtactgggagtgggtgtgaaaggcccttttgtgtgggaagccctccagcatgagtgaaagctgaaggaatgatcactgtaggtggaggctgatggagaagctggcagggtacatttcctgaagctgttcccgggtgcgtgatggttcaatggcccatgtacatgaagaggagggctggactcatgtaggatcaaggaaactaccccatggcaatggaagaaaagaaaatggagatggacacccctggaggcagcttattagctttggtggaggaacgatgggaatttattccaatgaccccagcattttcagctaaatatgagttgcattaacagacagaattatgaagggaagggagaaggagtttatagagggaaaaagcagaacagaaaaaaagaactatgcaagtctatcaaatggcagatgacagagtggagctgatgcagctacttcattcttcccggaacctaccagagaccttggcattcctgtaaggcaggtctagtggtgatgcacttgtccactttttgctttttggagaaacgtttgaaacatcctacattactgaagaaaagctttaattagtgtaatatttttacttgacagttttattggttttgttttattttcagcaacttgaatagaatcatgcacatcatgatatttgggtgaacaacaggccacatacacgataatgatctcattaaattataatactgtattttcactgcatttcttccatacttagatatgttcatatatatacatacctaccatggtgattcaactgcccacagtattcactacacttacatgatgtacagatttgttatctaggagcactatgctatcccacacagcctgggtgtagcagggtatttcacgtaggttcacgtaaacacactctatgatcctcgcatgatgacaaattgcctaaggacacattgctcagatgtatccctactgttaagctacacatcattgtatctcatctctctccatttttggtctctgataaaattctcgtgttgtttttgcattcttctctgagctcattgaacacatttataaggtttcctttgaattttctgccaggtaatcaatatacctccttttaatttgtgtcagtttctagtgctttgctttgttacagaatttggactgctttttttctctttcattattattatcactttgtacattctctgttgctttctgctcattagaaggaaaagccatggtaaccactcttcacagaatatgctcagggcaaatgccatcacctgttagcccagtccatgatagtggtgtctcttaaaatttcatactggtccaaactttttgttgttgttgttagtggcactcagacctatagaggattttaagttttcccctactctaaattaggtggcatcaaaattcatcctgcaggcagtctctgataaagtggagaaattggacaaagttttagcatgtatatggttcataaaaataatatgagtttaaggttttctcagccagttgctacatattgatattttataatcatttctttgaatgtctctggagtttatcttttgaaaatttagatcagaatatataccaggtttgaggcttcttgtctggcttaacgatctcctataggtcagcgtgtgaaaaggcacagagtctatctgaagaggagaactcagggaagccccaaaacaacagaggagacaaaactgaggactttgaggaatctaaagcttctgggacctgcagcctccagacatgctcagcaccctcttgttatccacggactaatttctttctcttttctgagtggtattttctagggttcccgtcctccactttgacactttggtatgtccatgtgtgtccattgtgtttcagccagggacacagaaccaggaaaacatcatggcttttctagagggagctgacctgggtaatcaacagttggagtagaaagtgcctttgtccatgtgtcacaggcctaagggccatgggcaggaggtcaggaagagaggatgaccagacggctggggaaaccaggatgaacaaagccactctccttcctggtgagaaggggcatgtggaagcctggtgtccctgtagggctgaaccacactcacctgcccactgctacctgccagcgaggtgacccacagagcagcagcagctcctgagtcactcacagaggctgcctcctcctccaaaccctccagtgtatgtgcttccataagtgtgagccccagcagatcccaaagttttcaatgggttcatctagctagtgtctgtcctcagccccatccccaggctcctgccctggttggtgtccacagtgtcccagcagcggtgacagtgacagccagggcctgcactttccagagcagcaagtttggaagaatcaagtcccagaaccagcctggatttggggcaaacacacaaatttcactctgaggggaagtgctggaaagtagccttgagtcttcctcagctcacctgtggctgatcctctgcatcccatcagcgatacatgagccctccccaaccccagcgtggagctgtttcaatcgcagcaggatgggaatgtgtcttctttctggggactttttaagcacagctcttatgttcctgagatttgaggtttataaaggtgtgtcagtcacccacagagtggacctgcacaagtaagacaaggacaggatccccaggagaggcacctcatatgagacgggacaggcaggtcccatcacagacactggtcctcagaaaccctgaccagctactcaccttcccaggtcacctgtgtctgatcagttcctgtgtttgctcctgaaaagatccccatcaagggtccccaggtcctgcccccttccttgatgtgcctctgggagtggggctggctgggctgtgggtctgctgtgactttccccacaggtcagcggctcagtgcaggctgcgccaactcggtggggctgggctgtggccgaccctcccagggggagcctggatgcttctcgggggcatctgcaggatcccaggttctgggagaacagggaagccacagtgtgtgcagggccccatctccaggtgtaaagtgtttgctgtcactctgttgacaagggcatatccccaggcctaggggcactgtgggtgcacaaccaatgtggtagacacagagagtaaggcacatttccctcccattactgtggggaatctaggcactgtgtgtgtgtgtgtgtgtgtgtgtgtgtgtgtgtattaggagttttgcagtgggctctgagccccgtgattttgtaggtttagaaattatctgatgagatgttcatccacaggaaccgacaagagattaggtgttctcccaaagcccctgggagctcctggactcattgtgagtgtggactgatccattgcttccagagctccacagaaggggctccctggtggtttcatagaatccttgcttggggtctttctgcagagttcactggctttcctacggccagtttagtattgtaagagatggtgtcagcagcacatggtatcacatgtcactaaatgagcattctgagccaggacacagcatcttcatactggggggagggaaatgctttgggagcccagacaggagcctctctgcagtgcaagggctgggctgcagggggcgctcaaggcccacccatcacaggctccacccccagagcaggtgcaccggaggctggggagggattcctctcaagatctgtgtcattcttctaaaaaaaatctaaaatgagtatttgacaaagactgctgaacattctataaatatcctattcaattgtgagcatttatcaaatttgatgttgtaatgagaaccacttttatactagatatttctaaccctgctagatatcttaatagtatgcagctggaggttaagcaagcttttcttttatataaataagtgcaactttggagaaacacactcatcccccgaataagacattcatgtattaaagcctagaaatactttaaattacctctgagccattcaagtgtgtgttcacagtgaagtcctgttctagggaaaattgttctccagggggagaagctttgtcaacatagagcttagggatgtatcaggaggcacatgacctctaaggggattatagcttgaacccttagcatcctcctgttggtaatacatgtgtcactctccaatctttctcatgcagtatcaggtatgaaataggatcgctcatgaatatgcaaataactgaggtaaatatagatatctttgtgccttgagagcatcatccaacaaccacaactctcctcagaagaagcccctagaccacagcacctcaacatgtactggacctggaggatcctcttcttggtggcagcagcaacaggtaagggacctcccagtcaccgggctgagagagaaaccaggccagtcaagtgagacttcacgcactcctgtctcctctccacaggtgtccactcacaggtgcagctggtgcagtctgggcctgaggtgaagaagcctggagcctcattgaaggtttcctgcaaggcttctggatacaccttcacaagctatgctatcagctgggtatgacaggcccatggacaagggcttgaggaaatgggatggatcaacaccaacactgggaacctaacgtatgcccagggcttcacaggacggtttgtcttctccatggacacctccgtcagcatggcatatcttcatatcagcagcctaaaggctgaggacacgtgcaagaggcacagtgtggaaacccacatcctgagagaaccagaaatcctgagggaggaggcagctgtgctgagctgaggcagtgacagggacaacgtggctgcaccctttgttgacatagggttatacacatacatatatatgcacccaacactggagcacccaggtatatcaagcaaatacaattagagataaacagagagatagacccaataccataatagctggagactttaacaccccactttcagcattggacagatcttccagacagaaaattaacaatgaaatcttagactaaatctgcatgacagaccaagtggacataatggatattgatggaacacttcatccaatggctgcagagtacacaatcttttcctaagcatatggatcattctcagggatagaccacatagtagaccagaaaatttgtcatttttaattaaaaagatatcatgtaccttctctgatagtaatgaaagaaaactaaaataataagaggaattttgaaaacacatggaaattaaacagtatcctccttaattaaacaatgtgcttccaaactgaactatatgctctaaaatgggttaataaagaaacaaacaagaaaattttacaatttattgaaagaaatgataatgaaaacagcgtatgaacacctatgaaatacagtgaacatagtactaagaggaaagttcacagctataagcacctatgttaaaaaagtagacaattataacataaacatcttaggaatatctctcaaaaaaaactagaaaagcaagagcaaatcaaatccaaacatagtaaaataaaaaagttaagatcagaacgttaataaataaaattgaaataaataaaacaataccaaagatcgatcaaatgaaaagttgttttttaaaaagataaaagacatctataaacctttaaccagaccaagaaaaaaaacaaagaagaccaaagtaaataaaatcagaaagaaaactggaaatattacaaccaatagtgcagaaaatcaaaggatcattagaggctactaggagcaactaaatgccaataaatcgaaatatctggaagaaaaggataaatttagagacacatacaacctaccaagattgagccaggaagaaattgaacagatcagtaacaagtagtgagagtgaagccataataaaaggtctcccagcaaagaaaaaacccgggacttgatgacttcatcactcaattatgacaaacatttaaagaagagataatacctaatctcactcaaaatattccaaaaatagataaaaagtagataaggaagggaagaattcttccaaacttactgtacaaggccaatgttacccttatatgaaaaccagataaagccataccaaaaaaaaaagaaaactacagttcaatatcactaatgaatatggatgcaaaactcctcaaggaattcttagcaaaccaaattcaataacatatcaaaagagcattcatcatgaccaagtgtggcttatcccagagatgcaaggatggttcaacctatgcaaatcaatcaatgtgacacatcgtatcaacagaatgaagggcagaagacgtaagatcaggccttaccttgttctcctcactcaaagtctaccattagttctttggtcctcttgaccagtcctgctgtacttggtctcccgtgattctgttcccaggtcctgaaacactgggcttctgcacacctggagtctctctctttgaacatggagaccctgtatcctcagagagggatgatgcctcattgtggctcccatgccccatgcaaacaattcttccaacacagtcatgatttttcctgttggaaattgaaaggggatgtgggaattgatgtgtgtgtgtgtgtgtgtgtcctcaggcctgttgggcctgttgagaacacagcagggctctatgtacaacaggaaagcaatgttttctctataccatctattttcttataaagtgttcataggtaatcaaaaggaaatgaatcacagtttataagatgttgtggactggactgatgttgtcactcaaggctactatgggggctccaggaaaagaaacctagaaaaggataagactgtgagcaaagaagcaaaacctgggaagcagcagggagagggtgagcaggggtgactcaactggggagggataacaccacttaccacagagggtgaaaactccgtgctcagcaaagaggagaacttactcagcatttcccctaatcctccctccagaagcgcgactgccaggaaagttcacaatgtatcatctccagctgggaacccaaaagaaacaggagattttagggcataggtcctgggcacaaggtgtttccctggttcctaccccttccctctctgtccagcaaaactgcttgtttctatcacttgccttcctgtccttggggtaagaatggatgctttgacactcagcagagggatgctctttcagaggaggaatgagtttgtgttatctgatgtctgagcaggacactcacctctgggaagaggctccaagacagaaggtcgccgtggttcctgccccttatatgtgaggggctcttgacacatgcacacttttcctcaaactctgtttataccccagcaacaatgctgggtgttgtcagcctctctcctccccagatactgctctatcatcagcttgagcacagtttccccatgaaaggcattattctctctctcaagaagatcaactttttacatgtcttcgatggatgacagtttttctgtgtgagaatctagaaataagaaatggggtaatggggacaagtgagctctctgtgtgactcactaggaagtccactgttattccaggtgtcctgtcccaggtgcagctgcaggagtcaggtccaggacccatgaggccctcagacacttccctctgcctgtgctgtgtctggattcttttttttaccatggatattatttgagatgaatccaccatcccgtgggcaacaggctggaatggctggggcacagttactagactggatcatcaaggaatacacatcatgcaccctccacccaggtccatgtccccatcaacagtgactcaaccaagagccagttctctgtgaagctcagctccatgaccacctaggacacggctgagtattactgtgaaagactcagtgaggaggtgtccttatgagccctgacacaaacctgtcagggcacttaggacctccaggaagactcaagaccaccaaggggactcacgaccactggggaagggcaggttgcagtaagcacagggccagccccagagcaggtgcaggtggagatgagaggctggtttactgccagggtctggggctgcttctccatttagatgtttccttcagagaccctcccttatttcatgatgctctgcttagctgtaagtctctgaaatatcacagttttgttgtaccaggaggaaaccttctctcaggtgctaaatgtagaacaatctctctgccagtggttgccagggtcacagccctgtggaagctgaagggtacccagtgagtcttctccagtcacattcaggacaggaaccttagtggggttccctgaggagaacagtctttaggaattctaacctcagccaagagaggctgggccagggtcagtgtcaggtagaacctcacaggatttacgtctgacccttctcctgacactaaagcatgcaaatcagtatcagcactgatctggggccccttttgctcctagcccattctatttcttgttagttgtatttgttgttgattttccttttgctgttcctgatccctgtaaagtggagatgtggttcctgctgtaaaaattccagggctcaagccctttccctgcagctcaggtggggctcagactgtggctcctgcaaccacgtgggagaggctgatgggactatcttctctcccgttgctcagaaccctccagtgtgttgtgtggagactcacctgggaatgcaagtggccaatagttgtgaaaggtatgcgcttgtttggtcaaagtggaatgtggatgtggaatttatcctgtgttgtgcaaactaacacaggttcaccttcctcacctgtagtgttagaaagagtgtgaaagttgtaagaatcaaaacagagccacttgtgttaacaccctgacaaatggacctaggaatgaacatgaaggagggttcttaggcccatattcctgataacaaaaactatcataaatagactctgcttagccaccatcttggatagaagcccaccacaaccttattaaaaattacacttgcaagaacatcagctcagaaactggctgttcaaccttacactgatgccaccattgctattgattctacaactatatgataattatctcaaaacaacttttgtaacccacctcattttcacttcataaacctgtggattgacatgttggagttactgctgcatttgtagataatgataaataataaggccttttaacaatgtttgaagctgctattctctgatgtctcttctaaaataaagaatttccaagtggatgacaatgaaaaaattgttagaaatatttggtggtaaggcatctttaacatcctgttgaatgtttctgcatagcacatcaatcccttaaaatactttgctatatctgcatttaatgaatgagtctaatattgaggtgcaattgaaaatacctgggcctttgatgaatcagctcatagggtgataatgtctgggtccttgagaaagcagaccctgtgttgtaagttttagtagaagtaccttttgcaaagaaagttcatgtgtttctgaacattatgctacttttaacttaagaatgcaatatatgatttatttttacttcaaactgggtatatacccagtaatgggatcgctgggtcaaatggtatttctagttgtagctccttgaggaatcaccacaatgtcttccacaatggttgaactaattttcactcccaccaacagtataaaaatgttcctatttctccacatcctctctagcagctgttgtttcctgacttgttaatgatcaccattctaactggaatgagatggtatctcatcgtggttttgatttgcatttctctaatgactagtgatgctgaacattttttcatttgtctgttggctgcataaatatcttgttttgagaagtgtctgttcatatcctttgcccactttctgatggggctgtttgttttttccttgtaaatttgtttaagttctttgtagattctggatattagccctttgtcagatgggtagaatgcaaaaattttctccgattctgtaggttgactgttcactctgctgatagtttcttttgctgtgcagaagctccttagtttacttagatcccatttgtctattttagattttgttgtgattcatacttggttaatttttaattgcattgttttcttctgattagttgtaagtatacctgcatattgatcaaaaaagccgtttaacaaatcaaaaggaaacatttaacaaatacgtgacttggaagtattttctccaagtctgttgttgtcttttactcccttgtcagtgtgtattgcagaaaaatatgtatgtgtgtgtgtgtgtgtttacaaattaaagaaacaggtataatttcatttatccatagatcacgtctttggcattacatctgaaatctcatcataaaatatactaatagtgatttttttttccatgtctctaatctcaggccacaatctactcatgagtgtttaaacatcacctacttgattagaggactatcaccctaagatatttggaatatttctggaaggagatgtgttctttttcccattatttctctatttagtcatttattaatatccgtattggtttatgaatgtctatttcatactctgaagtaaatccatgctatattattcattttattgttcaaatcaccacagctttattatgtgcttggaactcatttagtttggatgctgcatccttacagcacacctcatcattttgtttttgaacactttcctgtttcctggtattacaatacattctaagcccattttctatattaactttttcatacatagaatcagacatttttctaaagattgcttctttctgatgttaaaatatagtattaaaataaaatttgtgatactgggtatatgtgttgttaatgtggtataagtacttttaggacctctcaaccaactggcctagtaaatgtgcatgtttatatgaactcatgtttaaggacacattgaaactatttatgtatcttatattctgtaactttattacattaaaaatgagaatacactggtctcctcacccaactatgttaccaccatatcgacctttctaggcttccttgactgtccataatcacccactgcaaagtgaggaaccccatcccatcatatgccattgtattacttagctgcacaatttcaggacacatgcattgcagcatcagaaatgtaaagctgtacccttcttggaaccatttttatctactagaatagagtgcttatgtgcagtttctttacactttaaacttatagaatttcctcattttcaaagttccttagatcagcaacttcgttttccactttcttcatgaagtcatttcaattacactgtataatttctttatttgaattctgtaaaagccaaaactacagtcaagtaaacatagagaggatattccaggaatttacagagtgggtatcaaataagttaaaaaggcaatgtttaagaagagtaaaactatttttagtgatatgcaatggttgagacatgacacaattaatttgtctaagctcataattttgtgatgaaaaatataaacctaaatatatacaatttaaaatgatgtttagcagtacattatccctaggatcaaatgcagactgtataaaattatctaataacttatttggtgaggatgccatgagacacatgcaacaaagaatgaactaattttccttatttgcatataagatgttgacattcactaaagatctttaatttaaaaaaaaatcaattttctatgtgacccaggttttttcttccagacaagcaaataacccacaggattattttctttccttgattgagaaagattttccccaaacttcagctcagttcaggcatatactgtccctaaatgggcatttaccctcagatgagtccacacacctgtcaacacgtggagtcttctgtcagacaaacacacctttactgatgtggattcttccctcagacaaaaacacatgtccccacatggacactttcctcagactaccatgtatgtccttacatttacgctttcctcagaaaacagacttttcctcatgtggactcttgtctcagacaagcaaatatgtctccatgtgaactcttcactcagataagtacacatatgtccacatttactgtttccctacacaggcacatatattcaatgttgaattgttttgtggcaaaatgatctcaagataatggtaattataaaccccctccctaataaagtgtagatctgtattttttttgttgtaacctaactttgccttattgtcaaaaacagtaatttgcagctctaaatgcaccagttagagacaggtgtccattttctctggaaatgtatttttattttcttactggacatatttgttgataatgttgctactatgaagatacctgaacagtatccacattaaagaataaaaaagagtaatgggcagaataaccctgtgcatccagacccagaaatcctttgaccctgccctcccgaaatgtagacacagaggatggatgagcagtgctgagcagtgtacccatgaccacaaacatgaagacatggaaatgtgtccccactcctcctcatgaaaggcagctcatgccctcttccttcaggccctggtatggagccaccccatgtctctgcccttccttagtgtccacaccatggggtctgcactgatctggattcccttctcatccccctcaatattagtgtgccttgtgaatcaggtccagctgtggctgttctcagtctgtttcctctgtattcacagaagtcctgtgtgatgtttactgatggagtcagaaggagaaaaatttaacagcccagcagttcactgagactgtcctgcaaagcctctggtttcgggtttactgggtgcagcatgagcttggtccagcacgcttcacaacaggaattggtgtgggtagcaacagtgagagatcatatgggagttctaagggttactctccatgagtacagataaatcaacattcccaagtgacaccctttcaagtgcagtctaccttacaaggaccaacctgaaagccaagggcaaggccgtatattacagtgagggacacaggggagggaagatctgtctgagcccagacacaaaaatctctgcagagagacaggagggaactgcgtggtagatgctgctcagaaccaccatggggtggccaggaaacaaggggtgcttaggacctctagggagcgctcaggacgccaggggggtgctcagaaccactaggggacgctcaggacactaggtggcgctcaagacaacactactgcactcatgtcaccacggggtactcagaaccaccagggggcgctcagaaccaccagagggcgctcagaaccaccaggtggcgctcagcaccaccagggggcgctcaggacaccagggggcgctcagaaacactcggggacgctcaggacaagagggggtactcagaaccaacagggggcgctcaggaccaccaatgggtgctcagaaccacaagggggcgctcaggacataggtggtgctaaagacaacaattctgggctcaggtcaccagggggcgctcagaaccaccaggggacgctcaggacatgcaggttctcttaggaggcagctgcacatcaggagcttcagaggctgtgatttcctttcagaccctggaaattcctgacctggtcaagcaaaagtcttccccaggatgtctgatttttccttttaattccatgatttcttttacctacaaaacactaacttagaacagggatgtaatgcaacttttattgctgcgtattttctgagtaatactagcaatgatctctcgggacaattattaaaataggttatttatatattttaattattaaaaataatactattattaaaatagtaaaattttttaaatcacacttgtaatcccagcacttggggagactgaggcagacagattacttgagctcaggagttttagaacagcctggcaacatggtgagatgctttctatacataaaagaagaaatagctgagattggtgcaaccagctacttaaaaggctgaggagggaggattccttaagcctgggaggttgaggctgcagtgagctatgattgtgcctccacacaccagccttggtgacagagtgagaccctgtcttagaaaaaaaaatgcatatcctcaatacagactatttccatgaatagagttttgtgtttttgtgctgtaatagtcaaacaattgtatatgttttctaactttaactcagcatatgcatggtgttttgtttctttttctttcatctgctgtttgtggaaaataaacagcactttaaaggctctgtttctccactttgtttggcttccagtgtcctgtttttcagactgtttctccaccttcccttcttctttgaaagccatttatcttcctcagtctccatgcagaaaaagaaagtccctttactttctgtcttccaagtctggtgaatcagttcccttcttttcataatcactgaagccaaccaagtttagaagtataacagttctccttagaatacgctcatctacctgcactctctgccctcctcatccttttctaggtccctccagacatcaccctcatcccataccctcccttccttaagtaccacagagtgggctcttcacctcctgctgccctctatgtgctcagccctggggctcactagtcctttgattatgaagtccaaatccctatgtgcttgcacactctcacgccaccctctaggaagctgccattgtgagagagtcctgaaaagcatgggctgggtttagtttcataatgcatattatggtcaattagttattctatttgaacattctatttaattaatagatagagttaattaaatagagttattctatttaattctattaaactattaataaattagttattcaatttattaataacaggccaatatttaaaataaataccattgcacgtttaagtgacatatttgacaataattgcatttacatacagttttaccaaaacatgtatcgaagtgtatttgtttttttaaatattggaataggcagacatacacataggaaaacattattttgtactacaatctcaaactgcaaacacaatttaaatgccattaaataattagaataatatgaaacaaatgggcatggtgttttggtgtttaaatatacattcatttcacctgatcatacttatgtgtctttgctgggctgctgtgcatgtatgtgtatttgtatgaccatgaagctttcagatacatcattaaattacataaagtgttaccatgcacttccctcttttaggggacaaagtaaatctttcagggcaatcgcagggaaaatgtgtggttggatcttccacacagagtccctaccatgacattgccaagtagagctatggaagggggctaccaacctccagaccccagaatggtagatccacaggcagcttgcagctcgagtctggaaaagccacaggcacccagctccaacccatgagagcagccttatgggctgcattagggaagtcacaaaggtagggctgcccaaggccttgggcacccacccttgcaccaggtcacaagacatggagtcaatgattattttagagccttaagattgaaggactgtccgactaggttttggccttccataaaaatctttacccaatttttgggccattttctctttttagcataggactcctcacccaatttctgacccatcattgtactttggatgtaaataacttatttttgatttttcagtctcataggtgaaaggaacttttccttgagtctgaactttggattttgaattaatgccaaaacaagttcagattgtcagggaccactggggagggattattgtatattgcaatgtaagaaagacataaggggcagaatgatgtggtctggatgtgtgttttctccaaatcttatgttgaactgtgaaccccagtgttggaggtgaagtctgctgggaggcatggcattaggggcatatccctcatgagttacttcgtgtcatccccttggtgatgaatgagttatcagttcacatgacagctgattgaaagagcctggtaccactcccttctcttatcttcccccctattgtcatgtgacactcttgctccccttcatcttctgccttgactgtaagctttctgaggcactcagcagaaacagatgtcagcaccacacttgctgtacagcctgcacaactgtgagccatataaaacctatgtcctttataaattatccagcctcaggtatttctttacaattcaataatggacgaacagaagaagtatttaattgtgcagcaaattaggggtgtggaatcattaaaatggacttaacgcctgtagaggtaaagacacaagagtctctctctctctctctctctctctccttgaacccttctctgtctttacatacacacacacacacacacacacacacacacacacacacacacacgctccacgtgaagatgtcatgtgaccaaatagcaatatggtggctgctatgagccaacagtagaagcctcaaaataaaacctatcttgccagcatgtttatctttgaatttccagaattgaggaactgagataaaattaaggttgtgtaagttaccaagtatgattgtttttaatgtttgaactgactaaagagaatttgggatgaagaagtggggttctgatgttacaattatttcaacactgtggaaagtgccttggaattgggttatgtgtaaaaggctggatagttttgacatgcataaagaaatttatatattaagtgtcattctgatagattaaaatgagtagagtgctattggaaactggataaatggtgatctttgttataaagtgacaaaaaaaacttgtctagactatgttgtgatatttagtaaaagagaactttgagcagcaaaattgaatatttagctgagaacacttctaagtaaaatgttgaaagtgtagtttggtttctcctgggcatttataataagaaatagatgaattgaaaatgaaattataagggagaaaatatccaaaacttaaaggcttggaaaattctcaatctatctgtgttgcaaaaatcagaaagtgcgttctgaagagaacagtgagtatgaggctgtaatatcacttgataaagaatttatggtattaaaagagaataaatgcaggttttaaagaacaaggatggagatgagacaaaatggacgaatactgtcagattcttcagatttaagaggatggagctacttggttgcaaatgtgcaccattcttccagaacaaagaaaaataaaccttgaatttatttagaagtaatcatgaccactaccttggtttcaacagaccagaccatccatgcttaaaaccttgaggaaaagacctcctaccactgcctggaacttaggaactcccagtgagccttgtgtgtagggctgcatggggtctttgggatgggaccttaacccagcagttacccattggtgcctctacttaaagcattggaattaattctgctgctgcaatgagctgggaaagaagaagcttggcccagagaagattccacttgagccttaaggtctatggtaatttgttttgttatgtgttgtacttgctggggacacatcacccctcctttcttttctatttttctctttgggggagaaaatgtctattttatgcctaactcaccactgtattttgaaatcaaataacttgtccagcgctatggactgaatgtgtatgcaactccaaaattaatattgtggaaccctaatccccagtgtggtgtaattggggtgtgggccatttaaggggtgatcaggtgaaaaggttgaagccgtcataaatgagattagtgctctaataaaaagtcacgggagagcttttctctcttgcttccctgtcatgagatgatacgataaaattacggccatctgcaattcaggaaggaaacctttacatacacatgattggctgtcttgggcttcccagcattcggcactgcacagaataaatatgtcttgttaaagtcatgcactttatgacactttgttaaagcagccccaataaaataagatatctggttttactggctcagagttggagagaaatttgtttcagaaataattctacctcaaatcttactcatgtatggtttagttaatatttaaattatgttttaaacttgtttagagttgatgatgaaatgagttaagagtttggggactgttataatcaaatgaatgaactgcgaatgtgtaaatgccatgcatttgggggatggtcttttctattctgggtctttcatgcctacgtgtgaattgaaggattgcttttcttatttctgtgaagaaggccattattattttgatagataatttatctaatctgtaaataactttgggtagtatgaaaatttcaatactattaattcttccaatccataaatgtggagtatctgggatatatgtcctatttatgtgtgtccatttcattttctattaccaataatttatagttatcctctagaaatctttctcttatttggtaacatttattcctaggtatattttgcagctattgtaaaaggaaaggcttcatggatttcattctcagatgttttgctgtcaacatatagaaatgccaccaattattgtatgtagatgatgaatcttacaactttacttaatttgcttatgaattctaatagtttgtgagaaggctttagttttctttttttaatataagatctttttgtctgctcacaggaaatctgacttccacaattccaaatttgaggtcatttccttttactgttaactaaatactctggctagcatttcagtactattctgaataaaagtgataaaaatggttatttttgtcttcttccacttcttagatgaaaatttcccggtttttccatgcttcgtgtgatgaaagctgtgtttttctcatatatgcgctttattttttgagatatccttcttgtatacctaatttttgataatttctatcagaaatgaatgttgaattttattctatgattttctaaaatatcttgactacacaataacacagtaatatgcaggtcaatacatatcaactgaatttcacttaatatcatcccaacttctaatatttattttttagtattagaacatgcctgtttccatattatatttgctcacaggtattggtacatattttagctaatttgtcattattttactctaagaaataactcaaaaaatcatttttattatgaattgaaaggtaacatcggcaaaattagcccaatcttaatctttcccagactttgaaacattattgaagacaatgagaggggaaagtcagctttagttgagcttctaagaggtaagtgaggtaaaaacccagggcttattggctacgactttgaatgttactgtcttcttttccataagccacatccagaccattttctaaatctaagaaaactaattttatctcactgcttcttagtcttgtttcctgcagctgacaaccaaaactgtcagcgatagagcccagtgtaaatcaccagcctttaattattgcagaactatgattttacaacaacattgtgagttacataatgatcctactttatggccgcggtgcaaatgcttaacttccactaaatcacagagctcagaatggctagcatggaggtgtatatgtatatgtgcattgttctagaaatttccaattactgtatattattgtttgcagtaattaggtcaatctgaactgacaaaagtctccatggccttataagcacagagaccacctccacggcaggtggaaatcaaggctgggaacagtctaccagctgctcccctgggattcctccaattaccctgtttaaagcctctgctcactcatgcgctggaagagggatgtcagagatgcagtctactcttcctaaagggctgacagggcataaagacaagactgattatccatggaacattcctataggaatgcacctatgtgcagacacactaataagctgtgtgtcttgcagtgtgtaaatggctgagatgccatttacacttctttacacaatacatttttaaatgttttgttgatgtattctctatcattcaaaaaaatcatcactttccccctaaacaaagaggatttttatcagaacacttatgggaagccccttgctctcccagattcccaccctcatttctcctgaaggaagaaagaaaaccatctctattgatttccactctcatcctctaggactaaaaccagaaagctgcatgctccctgggtgagccttagagaagaccctgtctgtaggagcaggaatctcagagccttggctgagaggcatggtcctgaaatgagatggagtcccccatggagatcccacgtggacgcccacacctgagggctcactgctcctcaccacagatgcactcccctactgagtcctgagacctgagtgcaccccatagagtaggactcagatgagggaatgcaaatctccaccagctccaccctcctctgggttcaaaagctgagcacggggcctcgctcagtgactcctgtgccccaccatggacacactttgctacacactcctgctgctgaccaccccttcctgtgagtgctgtggtcagggacttcctcagaagtgaaacatcagttgtctcctttgtgggcttcatcttcttatgtcttctccacaggggtcttgtcccaggtcaccttgaaggagtctggtcctgtgctggtgaaacccacagagaccctcacgctgacctgcaccgtctctgggttctcactcagcaatgctagaatgggtgtgagctggatccgtcagcccccagggaaggccctggagtggcttgcacacattttttcgaatgacgaaaaatcctacagcacatctctgaagagcaggctcaccatctccaaggacacctccaaaagccaggtggtccttaccatgaccaacatggaccctgtggacacagccacatattactgtgcacggataccacagagacacagcccaggatgcctcctgtacaagaacctagctgcatctcagtggtgctccctccctacctctgcagaacaggaaagtgtgactgagatgccatttcctgccagggcttgtgtttcctataccaaccagactcagagccctgtctgttttcctattctgtactattaaatggcatgttccctgttagtgattcacgcaagcagaggctgtatcctgtttgacaaagattgagcatgaaagattcccattacctgggccacatgcatcactgatatgtggccacttatttcttgagctcatatccttccaaggggctgaatacaaatatctataacataggccatcttaaactgcaggaagtaatgttggagaagaatgtggagataaaagagcaggatgattaattaaaatccagataccatctttttttgcagagaaaaatttacactaataaagtaattttatgaaacaacaagaaagatggaatgtgtcctcatcatggagtgtctcacttgcagtgcacaaataaatttctaaaaattttatagggaagatgtgatagatgaggctgatttccacacagggagtgattaaatacccaggtaagtataaaatccaacacttggaaaggaaaatgcctcagcttgacatcagaaacccagctcagtaagtctgaggagcaatgcggaaaagaaatgaaaaattcgacaacacttttcttatgaaatccctagctcatgtttgaacacgaaaacagaattgtccacaattttaggacagccatcgcatgacaacaaaccactacaatgataggagcatcactgagtcaacggagttcaagcagtgagcagatcagtactgaggccccaggagaaccaaggctctttggtacattttacagaacccagaaccgagccacataatctatggccaagtgatctttgacaaagttaacaaaaattaaccaacgtatacaccagggaaaggacaccccattcaataaagggtgctggggatattggatagctatatgcacgcgaatgaaactggacccccaccctcaacatgtaaataattaacacaaaatagattaaaggtttaaatgtaagtcttcaaactgtaaatgtattcaaataaaacaccaggacaactcttctggacaaaaagcaaacaatagacaaatgggacttaatgaatctaacaagtttcttcacagcaacagagtgaacagacaaagtgcagaatgatagaaaatatttgcacactgtgcatctgacagagtactaatatacagaattaacaagaaactcaaaccacaacaacaaaagaaaacaagaaccaaataaccccattaaaatgagcaaagaacatgagtagacatttttgcaaataacacataaaaatggacaatagatatataaaaatgctcagcattactaataatcagggaaatgcaaattaaaactagtgagatataccattcacaatggctgttattaaaaagtcaaaaataacagatgttggagaggatgaaatgtaaagggaactcttagacactgttgatgagaatgtggacgagtacgacctctatagagaacagtatggattcagtatgatattgactgtgcatttgtcataaacagctcttattattttgagatacattccatcaatacatagtttaatgagagtttttagtattaaggggtgttgaattttattgaaggcctttgctgcatctattgagataatcatgtgttttttttccattggttctgtttatgtgatggattatgtttattgatttgcatatgttgaaccagccttgcatcccaggtatgaagccaacttgatcatggtggatttgaaaaccggcacaagacaaggatgtcctgtctcatcactcccattcaacatagtattggaagttctggccaaggaaatcaggcaagagaaataaataaagggtattcaaatagaaaaagaggaagtcaaactgtctctgtttgcagatgacatgattatatatttagaaaaccccatcatctcagccccaaatctccttaagctgataagcaacttcagcaaagtctaaggatacaaaatcaatgtggaaaaatcacaaacattcctatataccaataatagaaaaacagagagccaaatcatgactgaactctcattcacaattgctacaaagagaataaaatacctaggaatacaacttacaaaggatgtgaaggacctcttcaagagaactgcaaaccactgcccaaggaaataagagagggcacaaacaaatggaaaaacattccatgttcatggataggaagaatcaatatcgtgaaaatggccatactgcccaaagtaatttatagattcaatgctatccacatcaagctaccattgactttcttcacagaattagaaaaaaactactttaaatttcatatggaaccaaaaaagagcccatatagcctagacaatcctaaggaaaaagaacaaagctggaggcatcacgctacctgacttcaaactatactacaaggctacagtaaccaaaacagcatggtactggtaccaaaacagagatacagaccaatggaacacaacagaggtcccagaaataatgccacacatctacacccatctgacctttgaaaaacctgacagaaacaagcaatgtggaaaatgatcccctatttaataaatggtgttgagaaaactagctagccatattcagaaaactgaaactggatcccttccttacaccttatacaaaaattaactcatgatggattaaagacttaaacatgagacctaaaaccataaaaacccaagaagaaaacctaggcaataccattcagtacataggcatgggcaaggccttaatgactaaaacaccgaaagcaatggcaacaaaagtcaaaattgacaaatgggatctaagtaaactaaagagcttctgcacagcaaaagaaactatcatcagagtgaatgggcagcctacagaatgggagaaattgtttgcaatctatccatctgacaaagggccaatatctagaatctgcaaggaacttaaacaagcttacaataaaaaaaaaacaaccccatcaaaaattggcggaaggttatgaacatacacttctcaaaagaagatatttattcagccaacaaacataaaataaagttcaacagcattggtcgttcgagaaatgcaaatcaaaaccacaaagagataccacctcacaccagttagaatggcgatgattaaaaagtcaggaaacaaaagctgctggagaggatgtaaagaaataggaacgtttttacactgtggtcggtagtgtaaattacttcaaccattgtggaagacagtgtggtgattcttcaaggatatagaactagaaatgccatttgtcccagcaatcccattatttggtatatacccaaaggattataaatcattctgctataaagacacatgcacacatatttttattgcagcactgttgacaataacaaagacttggaaccaacccaaatgcccatcaaagatagactggataaagaaaatgtggcacatatacaccatggaatactatgcagccataaaaaggatgagttcatgtgctttgcatggacatgggtgaagctggaaaccatcattctcagcaaactatcacaagaacataaaaccaaacaccgcatgttctcactcataagtgggagttgaacaatgagaacacaaggacacagggaggggaacaaacatcacacaacagagcctgtcggggagtggggggctggaggggatagcattaggagaaatacctattgtagatgatgggttggtgggtgcagcaaaccactatggcctatgtatacctatgtgacaaacctgcacattctgcacatgtatcccagaacttaaagtatagttaaaaaaaaagagagagagagagaaaggaaacagtatggagactttccaaaaaatgagaaacagtactggcctttattctaccaatcccactactgggtagctacccaaagagaaagaaatcatatttcaaaaagatacccacacttctatgtgtaccacaaatctattcccaatagcacatatgacaacctgagtgtccaccaacagatgattttataaaagaatatagcatatatgcacaatttaatactagtcagccacaataaggaatgaaactgtgtcttttgcagcaagatgcctagaactgggggacattataattagtgaactaactcacaaacagaaagccacatatcacacattattacttataagtgggaggaaaacagtgtgtacacaaggatatggagagagggattatggacattggagacttagcagaatgggagggtaggagttgggagcatgatgaaaaatcacctaatgggtacaatgtacgttacttgggtgttgggtacactaaagccaataccactgtgtaatatttccatgtaacacagttgcacccatagcccttaaatttatacaaataaagataaaaacaattacaatttaaaatataaaattattaatagttgaccaaagatcttgaaaattaaaatttaaatcatgatcaataaatgaaattaatatcagttgaacttcatttaacttaaaatccttttgtactcaagtgattttaagaaaatgaatgtcaagttttagatgaggagatttgcaaatcatatcaccacctatgtaattatagtaagaaccctcaaaactcaacagtgaataaaagaagaggcaacccatggataaaataggcaaaggtttgtgcaggcatttcattaaagaagatgtacagattacacataggcatataaacaggatctcaacaggatttttcatcacagaaattcaaatcaagaccacaataagatacccaaacaccctttttagaatggctgaaattaagaagaaagatggatcataccgatgctggtgagcataccaggtttctagagtctaaaacattgctaatgggaatgcaaaatgaaacagctacacaggaaaataattcttagtttcttgtaaaattatatatgcccttaacacattacctaaaaatccccctcctgtaatacagtaatacatggctgtgtattactgtgaaagaggcatagtgtgaaaacccacatcttgaaaccctgagggagaaggcagctatgctgtggctgaggagattacagggattatttgattaaagacttttttagaaagtgaggttaaatcagccgggcgtggtggttcacacctgcaatcccatcactttgggaggccgaggtgggtggatcacgaagtcaggaatttgagaccagtctggccaacatggttaaactccatctctactaaaagtgcaaaaaattagccgggtgtggcggtgtacacctgtaatcccagctactctgggcgctgagacaggagaatctcatgaatcggggaggctgaggttgcagtgagccgaaatcgacccactgcaccccagcttgggtgacagtgcaagactccgtctcaaaaaaacaacaacaacaacaaaaagcgaggttaagtcattgaaaaataggaaaatataaatgtgtatgcactctaattatttgggaaattttccatacaacttgtattctgtaaacaaaattcagggagtggaaaacaaatcaaattaataaaactgatataagaattcctctgaagatattagtgtgagcactaacacacacttttgaatgggtgttgtaaatattttggaacacacctcttaggtcacattttaattctacatttatgtaaattatataaaatatcgaaattttttaatgtctccattttgtgcagttataattttggtttcatgccagcaatgcatgatagattccgttcttccacatcctcgttgccatttggcactataagcattgtgtattttaaccattctaatctattggtggtgatagctcattgttgtttaaatgcacatgtctctaaaattttatatttaattattttatataattgtgatgaagtgtttgttatggtatttggctcatttttgatagcattgtttatttttgatcagttgtaagtttctttacatacccattatataagtcacttaaaaaagtacttagctggtcatgaaccccaggatgagatgcagactgtatagaaatctctagcaatgttactcagtgtgggcagggatggcatgagatacggggaataaagaataaagtaactttctccatttggatataagatgtgtccattcactagagagttttctttcagaaggttcccatgtgagccagtttccttcctgacaaggaaatcacccagaggattctcataatctcttaagtgagaaaagttttcctcaaactccagctcagtctagctcacactgtctctaaatgggcaattactttcagacatgtacacacatctgtcccaacgtggactcctccctcagacaagcacacacattgcaatgtggactctcccctcagaaaaccacacatgccccacaatgactccttcttcacataagcatatatgcctgatgctgaactgctgtgtagcaaaattagctcagaatacaagcacttatggactctagccataacaatgtgtagatctgcattttattttaaattctaaatgaacattttgccttcttgttaagaacagtggtttacagctctacatgtagagactacaggcagatatatgtttcctctgggaaaagtttattttcatgtatttactgggttattttgttgataaacattcatctataaagacacctgaaaagtgccctcattagagaaaaagaaagtgtagtttgcagattaactctgagcatccaatcccaggaatcctttgatctgccctccctgaaatccacaggcagaggggggatgatcgctgataagtagcaaacacatgtccacaggaagggagacatggaaatgtggtcactcccacactcaagaggagcagctcatcccctgtccgtagtggtcctggtgaggagccaccccacacctgtgccttcctcagtatccacaccatggggtctgtgctgatctgggcttcccttctcatcactctcaatattagtgtccttgcggatcaggctcagctgtggctgctccagatgaggctgttctcagtctgttccctctgtgtttgcagaagtcctgtgtgaagttcaccgggggagacagaggaaataacggtgcagccgggggctatctgagtctctcctgcaaagactctggattcaccttcactgattgcagcataagcttggtccagcaagctccaggaccagggttgatgtgggcagcaacagggagaaattgaagaggaagctctcagtggtgccctccatgaatacaaagaatcttcacagtccccaggacacccttacgtgcatggtctcactgatatctttacttcttttatcacttttgttatgtaaatcacaatgaatagtgtattcctcatctattatacatttgttaagtcttttttggtgtctttaaaaaaactgataactttatagtatgtaatatccttaagtcctgaaagtgttttttgatgtctaccttgtcttaaatttatacagctactatagcttttcttggttcatgttttctcatatttatcttttctatttgtgaatatgtagagaaactttcttgtacatagctaatagttgtgtattgcttttttattttggcagtccttaaatattctaattttttatgatactttaagttttagggtacatgtgcacaacatgcaggtttaaacaaacaacctcatcaaaaagtgggcaaaggatatgaacagacacttctcaaaagaagacatttatgcagccaaaaaacacatgaagaaatgctcatcatcattggccatcagagaaatgcaaatcaaaaccacaatgagatatcatctcacaacagttagaatgacgatcattaaaaagtcaggaaacaacaggtgctggagaggatgtggagaaataagaacacttttacactgttggtgggactgtaaactagttcaaccattgcggaagtcagtgtggcgattcctcaggtatctagaactagaaataccatttgacccagccatcccattactgggtatatacccaaaggattataaatcatgctgctataaagacacatgcacacgtatgtttatagcagcactattcacaatagcaaagacttggaaccaacctaaatgtccagcaacgatagactggattaagaaaatttggcacatatacaccatggaatactatgcagctataaaaaatgatgagttcctgtcctttgtagggacatggatgaaactatctattgcttttttaaatcaactataataaattctattttttttttttgagaaggagtctcgctctgtcgcccaggctggagtgcagtggtgcgatcagggctcactgcaagctctgcctcctgggtttatgccattctgctgcctcagcctcccgagtagctgggactgcaggcacccaccaccacgcctggctagttttttgtatttttagtagagatggggtttcaccgtgttagtgaggatgctctcaatctcctgaccttgtgatccacctgcctcagcctcccaaagtgctgggattacaggcatgagcaataaattctatttttaaaccaacaatatttttttccgttaatttttgtttaaattaacattttgtaatgatgcttatttctctattaacatggtatttaattacctttttataaatattgtatagttaccataagatttacaataaaaattgtatgtaattagattctaatgtaaatcctgtgatggccttgatatgaagaacacagatagtgtaactgtgtgctttgaattcctccttctcgccactctttcttgtttattctgtttgcacttacatatgctgtaaaatagaatatgtaattttttattactttatacagttatatcttatagcaattacaaatgttaaagagtacaattcatctagatttttccatttttacaatctttatttctttgtagagatttctattttgagtgcatatcacatggctactcgcagagaatctttgtaaaatgtgccctgaaacatgaatgtgctgacaacacatattctccagatctttttttctgacagaattttatttgccattcacctttaatgaaattttaatgcatgtagaatttcagtttgcatttcacctgtaatttattttcttgtaattattattagtttttcctggagatgatcacacattacattctgctgggcctttattaaccatgtttctgcgaacctagtcaggcttgggtttcaagtgtatggttgccgtggctatcagagttgaaatcagcttctcctgttcacaaaaacttcaggttcctctggtgatacctgcgtttgtgtccctgtttggctttggatcttcacatttcattctccccaaagaaaggctgtctctttcagctgtggcaggtgcatcctgctgacacatttacttggtgactttttgtgggatgaaggggcttggacacaggggcacgttttccaaccttctggctgagcctccttcttagctatgggtggtgagactggctctgatgcatgatcttccaagtgttcctgttccttcccttcctcagtgtcacagtgtctcttcccagtcatgctgttttttcatcagtgtcctcagcttctgacccactgtccttaccccacagattctggatttcattcctcaggaaacagacgggaggtgattctgggtagagtttccctgatgtcctctgtttccttgtgttctagttgattctaccagtgcccacaggacacaagatttaataaatgtctcctgcatataatgaagggggattcagcattgaacggagctactgttcttcctccccagtcaacaccacaggacagcaggtgggtgagttgtctggggatttccccaattctgtaggaaaagcctgcaagtgccaggagtttcacactctcacaccattagcacacacgtcttcaagcaactcattaaacatttccaggttagctttttcctatcttcaataccatgccatgagtggcacctgccccaggtactctaataaacgcaccctagttctctctgcgggcccctattttctcatatttcagggatttttttctctgtgacatcaactcagatatggtgaggggtttattttttgtaattcttcatgttttttgttaacgaggtcagaataatatcattttctcaatttttacattctaacgcttagtatctgatttctaaataaaattcagaaactaagacaacaaatgaagtatccattatttggtgcattgttaaacaatttgagaaatattcatgtactgaaatagaatgaaccactgaaatcaaggcatgcctcattcacataagaacatgagggcattatcaaataattttgctgagtggaggaagctaaagaattcaccatcaatttcatgtgatttcatttgtataaatcacagaagatgcaatattctaaattaacatagagaagatctgaatttctctgaaaatagggtgggcagagtaacaacgtggtgaaataaaattatagacaagttagataaaaaaattagaggttaacttaattgctaaaacatgattgaagtgctgattcaatgactgcacacatatatcaacattttccaaatgcttcactatcaatttgatttcattattgattgtttttttaataaagcagtaataaaaatgaatatattggctgagaaagagcaagaaatggataaataccgacacttgaataatcaaggactcctgaaaatacacacatgtgaacactgattgtagatttcaggtaaacactagaaaaggcaaaattacacaaagttgttatgacaggagggacatcctgaaaacctctctaggcatgtcccacaccaccctggagctgtctcaggggagcagtctcctccagtgtttagaggcacaggcacgcataatagggctaactctggccagatgtgtgatattggacacattgcacaactgctctgttctgtatgtaatttatcttctctacaaatgtaacattgacagttgcattaaatatattctgcaaatatgtaaaagttaaataagctgatgtctgctaaatgattaccaaggcacaatcacataatctgaagttatattttccagagtgataggattacctccagagttttccaggacactctcatctgctccgggcactgccttctcctcagccgtcccacccctgagcttgctatatagtaggagacatggaaatagggcccactctctgctgataaaaaccagcccaaccccgaccctgcagctctgggagaggagcccagcccccgaattcccaggtgttttcatctggtgatcagcaccgaacacagaggactcaccatggagtttgtgctgagctgggttttccttgttgctattttaaaacgtgatctatagagaactagagatattgagtatgaatggatatgagtgagaaacagtggatacgtgtggcagtttctgaccggggtgtctctgtgtttgcaggtatccagtgtgagatgcagctggtggagtctgggggaggcttggcaaagcctgcgtggtccccgagactctcctgtgcagcctctcaattcaccttcagtagctactacatgaactgtgtccgccaggctccagggaatgggctggagttggtttgacaagttaatcctaatgggggtagcacatacctcatagactccggtaaggaccgattcaatacctccagagataacgccaagaacacacttcatctgcaaatgaacagcctgaaaaccgaggacacggccctctattagtgtaccagagacacagtgaggggaggtcagtgtgagcccagacacaaacctccctgcagggccatgcgggtggtttcctttctcagctgcaggaggcgggcttattgttgcaggactctggagacttattaggttgtgatattttactatggttatttatcatgaacttttttattgggaattgtgttttattaatttttattttatatgtaaggttatttttttaaaatacataccttcaagaaataattcttcctaataatttgcacttgttctttttagagttttgttaacatctgttgatatcagctactacatagctatagggacattaatttacatctatagacatatgtgtaaatacacaaacttatacatatatgtggtcttttatatttaatgttataataaaattattataacaattataaaatacatcctaaagaatgaaacatatatagtaatccatattcctttcaatcattgcctatagtttacataaattgatgtctatttgtaaccttaaacatagtgtattggtcattttcaaacatccaagaacaaatttcaaatgtccttgtcacacacacaaaaataaaaatttgaggatttgaggtgatatatatgtcaatcagctcgattcaattattccatattgcattcataaatcataacatagctttattcactataaatacatacaaccaaaatttctcaattttcaatgaaattttaattatacatattttatctgtcctaggtcatgaatgtttttctccctgtccggatgtgattagattgtcctgagaaacaaattcagcttcctgcctcctgaaggcttcaggaagcagctcctagatggggtgaagcaggcaacccgtgtgtgtccacaggacccggagcctctctctccttggattaggccccctcctcaggattacagggctcttcagttttctcaacatgctgttataccagagaagcacaaaacacttaatttcattatatttttcttcaatttttcaaaacaacacaaaggtaataattttaacaataaacatattacaacctactatacatgagacccttcctgtgcttcgaggtttcttctcaggactttgtatgtattacatgttttcagtttttttctgagatggaatgttgacgtctccttattacagattattcttttaatttgtctcttagaataattttttccagagctcctgcccgcccgcgcctggcggaatggagcggcgccagggctgagccaggcgcgcaggggccgccgcacgtgccgcgcggggagcggatgcccagcgggcggagagccagcgccagaggccgggtcggagcggccgctggagcagcgtcagaatgggagaacagcccatcttcaccccccgagcgcgggtcttccagattgaccccaacaccaagaagaactggatgcctgcgagcaacaggcggtcaccatttcctgtttctatgatgtcacaaggaacagctatgggatcatcagtgtggacagcgccaaggtgaccataaacaacacaattacacagaatatgaccttcaccaacacgtcacagacgtctgggcagtgggccgacagcagagccaacacggtgtttggtttggggttttcctctgagcagcagctgacaaagtttgcagagaaattccaggaggtggaagaagcggccaagacagccaaagacaagacccaggagaacatggagccctcgagtaatcatcctgagaatcagggcgtggagccccatcttctactccggcatccagtgtcaacgggacggacgatgaaaggcctctcaggccgctgcagccgacacgcacctgcagtctgggaaccacaagctgaaggcggcctcgacgcagagctgcccacgggaagaggtgggagatggagctgcagacccggcgggagaccgacttccggctgcccacggcgctgcaggagtcgacggccagtgcggagcagaggaagaggccgtgagtcagagtgcgactgtgtctctgagaagatggaggcggcagagagaggatcaaaacctggaagataaagtgcgttccctaaagataggccctgaggagagcaaatcccgacagcgccacctggaggcgcttcctggtggcgctggaccggaagatccaggcctgcataacttccgcccaggcctcccaggctgggcaccaacaactagggctggcagaggcccgggatccccaacgtgagtcctaagtatgtgtgcgagaccagatggcgctaggacgttccctgtgtgcgttgcttctgtaaatgcaggcgccgtgtgtcgtgtttccaaaccagttgtgccatccactcactcctttccagaatagaaatctctcgcttctctggccttgtgaggttgtggacaactggaagattctgactgaggaaaccagaaccaggtctaccttcaacatttacgcagtcaggccagggatgtttatatcgttcataagggttgttggaaccatatgaactgaaaaaaagcattttctcatccaaatattgatattctttacaccaggccatcgggctccttttatccgatagcattcagagtatttgaaggtcctccaggtgccagccttgggggcacagggagaacaacattcctctccgaaaacatggggaagctttaaaataactgtttagtggagacttgcccagagatggaaaacaggtttctggtgagtacattttctggtttgggaatcacctgcatccccgatcctgccccgtgccccccagtttgtatggttgtgacaatgttccatttctttgttttaatttctgagcagttgactgtggtgcgggaacagcacacagtgagggtgcctagcacaatgcctggcgcaaagtaggtgctttataaatatttgttcaattaaaaaaaaagagggaggctgaggcaggagaatcacttgaagctgggaggcggaggttgtggtgagccgagatggcgccacttcactccagcctggcaacagagcaagactccatttcaaaaaaataaaataaaataaataaaataaataaataaaataaaaaatattttttccaagccccactcaaaaccatggtattgttagaggtgtaatagttggaccaacattgaaaatacattccatttagttcatgggcgtgcaaatatccttttttctttaaaaattgttctcagttgtaatattacaaaaaatattggtaatttataccaatgacacaggttaaaatgttgtataaataatttaatgacgtttgattggaaaaaatacatgtgccacatgtcgacaattttttccttctctatgaaatatatactcattaataagtttcagatgttacagttatctttttgatttctgggatttaattttagtaggtatacttgaatgcattttattaattcctataatgatgttgatatttcatgtaggattttaatactaattttactatttactgaattttaaactattctacatgttttatttatataagaaaaaaattacatatgagaaaaaatgcgtagacctgaaatgtatcactagagagtttctgtcaaatgtgaatacctttgttcccaacacctaaggtagcctgaagagcaagtccttccccacaacatgcgtctttttctgtgcttgcggtcagctcctgcatggggaaatgttttgatttctgacactatagatccattttttttctgttttgaactttatataaatgcaatcaaacattttagaccttaatttggtaatgggctacattgctattttttgaggttatttcctgctatttaaggtattaaattagatcaacatattatcatttattcaagtaatggactgactctgatatgaaacctcaaagttttcacatatatatggagagagagagagagagagagagatgagggagagaggttttatatctgagtcagtctgttaaataagtaaatgacagtattttgatttattttcctgtaaatcgactttaaatttgtttccagtttatgaatattataaacaaagctgttacaaatgtcttagtgtaagttttcctatgttgtcttccttttattgagaaaatatgaagtatgtatttattataagcttaaattttttcagttttattgaggtataattgaaatattttaataatgtatagctttaaggtgccccacttgacgttttgatgttgtattagtccattctcacggtgctataaaaaatgcctgagactgagggatttgagaaaaaaagtgtgtttaattggctcacggttctgcaggctgtacaggaagtgtagtggcttctccttctggggagagtcaggaaagttaggatcatggcagaagacaaaggggagcaggtgcgtcacatggccagaccaggagccacaggaagcagggaaggtctacacactgttaggcaactagatcttatgagaactcacacactgtcatgagaacagcaccaggagtttgttctaaaccattcatgaaagacccaccccatgtcccagtcatctcccaccaggtcccaccttcacaattgaggattataatacaacatgagatttggggcaggacacagatccaaaccacatcagatacacattgtgaaatgctcatcatggccaaggtaatttgtatatccattttctcatggagctaccattttatttttttaaaatgtactacatgtgtgtgtatgtgtgtgtgtctcatgagaacacctacgatctacccgttcagcaaaaatcacatttacaatacagcattaaatacaagaacattgcagtacattagatctgcagaactcattcaccctgcacaactggacctctacccttcgaccgacatcatctgatttccctctcctcacaggcctgggacccactattctactctctgctttcaagagcttgaatattttagatcccacatgtaaatgagatcattaagtctttctgcatctggcttattccactaagcatcatgtcctctagccccatccctgttgttgcaaatgtcagaatttccttcttttcaaagcctaataaaattcagttttctgtgtacacattttctttacacattcatcaatctgtggtcattaaattattttacaaatctacactattataaataatcttgcagtgaacatgtgtttgacataataattttatttcttttgaatatatgacaagaagtgggatcaccagagcatatgatagctttatttttcaatataatgaataaccaaacctaccacaccatgcttttgaagtcttagtcatattttatttgcctaggccaatgtcccgaaaaatttctcctacattttcttcagtttgtacatttaaatattgaatccatattcaattaatttttgtctatggtgaaaaactagaagtctagttttattcttctatgtgtggctgtctaagtttttcagcaccacttactgaatagagggttgtttctccattgcatatttttgtcagttttgtcaaagaacaggtggttgtagaaacttgtctttatttcttggctgtctattcttttacattattattattgttattgtttttagtagcagtaccatgctgtctttcttactgtatctgtgtagtataatttgaaatcagggaatgtggtgctttcagctttggtctttttccttgggatttcttttgctattcaggctgttttttgattccatatatatttaaggattttttttaaaacatgtaatcaattatattggttacttgataaaaattgcattgaatatgtatcttgctttggacagtgtattagtctactgtgcattgctataaattaatgcctgaggccaagtgatttacaaagaaaagaggcttatttggcttacagttttggaggctgtgtgagaagcatggcaccagcatctgcttcttgtgagggcctcaggaagcttacggtcatggtggaaggcaaaggggaagcaggcggtgtcctgtggtgagagggggcacagaagaggggaggagggtcgctagactgtttttaacaatcagatttcaaattagctaataaagaaataattcactaattaccatggggttgataccaagccatacctgaaggatcttttccccacaatccaaaaactcctactaggacccacctcaaatattttggatcacatttcaccatgagatttggaagggacaatcacctaaactgtagcatttcactcttgtgtcccctggtctcaaatccttgtaagattgcaaaatcatctttttttaaaatagttcccaaaagtgttaacttgatcaacctccaactgaaaattacaaagtctcgccagggtcttaaggcaatttccctccagctgcgtgctggcaaaatgttttaaagagttatgtacttccaaggtgcaatattgccattgggtaaatattgtcaatacaaaaggaataaattggccaaaggccccacacacacctaaagcctagcaggacagatattaaatcttaaagctacaaaataatctatcttgactttatgttcttagtcagggtacaccaggacaaagtgggtcccaaaatcctcaggcatctcatccttatggctgggcacattccatggggctaataacacaggccagagtcaagtgccagaagtagttccaggttgggagtacaagctgcctttggatctaccattctgggatcttgagggttgtggctgcatttctgtagctccactatgaagtgccctagtggggactctgaatggggttccaaccccatctttccccatctttggtactgccttcgtagaggttgtttgtggtggatccagtcctgtagcaagcttcctcctgggcacatagggttctctacacatcttctgaaatctaggtagaaactgcccagcctccttcactcttgcattctgcatatctgccagaatccagttatcccagcaccatttactgaacacagaggtttttttccacattgtttgtttttgtcagccttatgaagtatcagacggtttaggtgtgcagctttatttctgtttcctattttgttccgtttcttctgcatatctgctcttgtaccagtaccaagctgtttttgttaccatgtcattatggtgtagcttaaagttgggtatcatgatgcctctggcgttgttctttttgcttagcattgctttggctattcagggtcttttttggttccatacaaattttagaatagattattttttctaattctgtgatcaatgatgttgatagttttatgtaaatagtactgaatctgtaaattgctttagacagtatgataatttttacaatattccttcttctaatccataagcatgaaatgttttcccatttatttgtgtcatgtatgatttatttatttatttatgctgtgttttgtagttctccttgtagagatctttcaccttgtttgttacctgtatttccaggcatttcatttgtgtgtgtgtgaatattgtaagtgggataagactgtgttcttgatttcactctcagcttggacatagttgggtatagaaatgttagtgattcttgtacattaagtttgtatcctgagactctaccaaagttgtttatctattttagaattattttggcagagtctttagaattttctatgtgtagaattatatcatcagtttggacagatatatctacttcttttcccatttagatgttgtattagtctatttgcacactataaagaaacacctgagactgcataatttataaagatttttaattgtctcatggttctgcaggctgtacaggaagcatggctggggaggcctcaggaacccaacagtcatgacagaaagggaagcatcatgtcttacatggctggagcaggaagagagaggaggtaggtgccaagtacttggaaaccacatctcctgagggctctgtcatgggaacagcacaaaagagggtgaagcatccccatgatctaatcatccctcaccagtccccacctccaacactgggaataacaatttgacatgaaatttgggtggggatgcaaatacaaaccatatcagctccgttttattttttctattgcctggttgctctgactacgatttccagtagtatgctcaataggagtggtgagagagggcatccttgtcttatttcagttctcaaggggtttgagcttttgctcactcagtataatgttgagtgtggttttgtcatagatggctgttattattttgagttttttttttttttttttgagacggagtctcgctctgtcgcctaggctggagtccaatggcacgatctcggctcactgcgacctctgcctttcggggtcaagcgattctcctgcctcagcctcccatgtagctaggattatggttacgggcatgcgccatcacgcccagctaattttttgtatttttagtagagacagggtttcactgcgttagccaggatggtctccatctcctgacctcgtgatccgcccgcctcagcctcccaaagtgctgggattagaggcgtgagcccccgcaccaggctattttgaggtattttttgatgcctagtcttttgagagtttttatgagtgaatgttggatctcatcaaaagctttctcagcatgtattgagaaaatcatatgttttttgcttttattttgcttacatggagaatcacagttactgaattgtggatgttgaatgaaacttgccttccaggggtaaagcctacttgatcatgacgtatcacattttaaagtgcttctggattctatttgttagtattttgttgagaaattttaggtctatgttcaccaagaatattcatctgatgttttcttttttaattatgtatcttcctgattttgtatcccaaggacacacaatgaaggaaggacagtctcccaacaaatgatgtaaaaactggacatccatatgcaaaataaataaaattagaccttctctaacaccatatacaaaaatcaacaaaaataaacataacatgaaaccataaactcatagacaacatggaaaaataattcatgtcattgattcagaaatgatttatttgaagttaatcccaaaagcaagcccagcaaaaaactacatgcaattatatatctgacaagaagttctatcaaaatgtataaataatccatacaactcaatagcaaatatcaaatgacctcataaaaagagcaaaaacctgaatagatttttttcagaagacacatgcatgaaaaacagagcataaaaatgtcctcaagatgactaattgtcagaggaattcgaatcaaaagcacaatgacatatcacctcacaccacttaaaatggctattatcagcaagacaaaagataagaaatgttggcaagaatgatccacagccataaagagagctttgattggccaagagactgatttcagtaactttctcctgtgaagagaccactgaccatggacttgtcctggccaatttccagaggctgtgcactgtgtgtctttctgcccctgcacaaagcccttttgatatgcaggacccaactgtaattcatttagttcttaagtcctcaccccaaagcaaagctgaaatgcatgtatcatgtgtgtttgcttattagacatgagagcctccactccatgtgaatatccatagctccttctatagcctgctgagtgtgtacactcgaccaatccatttgcacaaatttgtttctcatctttccctctcttaaagtgcctgctcacagtctctgtgggaggctttccttcccagcctgttaagatggccatcctgcagcttcaaccctttctgagaaataaagtctcctttctaaatttataaactgggtgattcttccgttgaaagcacaagctgttgggaagagttatatggcaattccataaatgcctggaagacaagtgtggatagggtagggtaagaagtcctgggggctgcacaccccactctgatggaatttccctccagaaacttctgggttctcaagatgagaatccaaacagattccctcatggctctgtcatcaggagaactatactctgataagtatgcccagaacttcctccagacagaccctatagggaaaaaatacttttcaagatctttattctgtgaggggaagggattcttttccatcccagacagcttcatcttagccttcctgagtcatgaaaaggagtataattaataaaacatctggggtcagattcaagaaaataatctgtggatgctgcagccaggagggggagtggaggacggaggaaaatcagctgtaccactgaatactccttgtaaatggtacagcctagagaaagaatagcaagaaatcattggaattcaatttccagaacatatactgctcccctacccaccacatcacctcaccaccaatatgattaatctggattaaagagaaaagtgtggaaaggcacagactccatctaaggactagaatttagggaaaccaaaggcagtgggagagaaaaagtcaaggacagtaaagtgacttaaaacctcttagaccaacagcttcaggaacaaggtcacatcctctccctcactgaaattagatttacctctcatggggcatctgcagggtgcgcaggtgagaactggcaaagagaacatgaaggcactttccaaatctccattagtacctagctcgctttagctgtttggaaaaagcaaaaccacaacaaacataaccaggactaggatcagtgttggaagcacttttcactggcaagacactaagaaggagggcaaattcgaggccagttactatgcaaatatgccactgtgagtgtgtgtggtggtgagctttgagacatagggtctgtgggtaaagttataatcgataaaatcttcaaccacagaatcctaaaaaaaagagccttccccaaagtcccatcagttcctggactcgccatgtgtctggaccgtatcagtggatccggagctccagggaaggggctccctgatggcttttatgattccttgcttgccgtgctgaggtctccctgtagattatgttgggttttctaaggcctattttctattgtaagaggtggtgggggaaacaatttctgtcactgaaagagcattctgagccagggcacagccccttcctactgagcttgagattctgggaggaaaaagttctctgacaggaggaaaaagttcccagacaggaacttccctgcagggcaggagctgagcggcagggggcgctcagggagcacccagcacaggacccagccctggggcaggtgcacaggaggctggggcagggttttctctcaggaattgaatgttccttatttcaaagcaataatgacctaacatttaaataagaatttagcaagtactgatgtgcctgtaagtattttattgtatacgcagcctatacctaacccaataatttaatgcaaaccggatttaaaaggagaaatgtctaggtctttcaaatgtatttctagttaggaattgaggggtggttttattaattcaatgggtgttactgtccggagacacactcatcccagaagttagatgtgcagagggcaaggctcaggaaaagttcaggtagacagtgagccatatgaacagggaatcacattgaggaccatgtcctgtgagattctgggtttctgtgagaggagttctgtcttcatggacttctgggcatgtcagaggacaaatattaaacaaagttcagggcagggagctcagcatcccactgtggcgtggtccacatgtcacctatcttcttcctcagggtggcgtggcctgagctatgaaaaacctgcctcatgaatatgcaaatgcactgctgtctaccgaggtaaatacagatctttccttgcccagagaccatcacacaacagccacatccctcccctacagaagcccccagagcgcagcacctcaccatggactgcacctggaggatcctcttcttggtggcagcagctacaggcaagagaatcctgagttccagggctgatgaggggactgggtccagttaagtggtgtctcatccactcctctgtcctctccacaggcacccacgcccaggtccagctggtacagtctggggctgaggtgaagaagcctggggcctcagtgaaggtctcctgcaaggtttccggatacaccctcactgaattatccatgcactgggtgcgacaggctcctggaaaagggcttgagtggatgggaggttttgatcctgaagatggtgaaacaatctacgcacagaagttccagggcagagtcaccatgaccgaggacacatctacagacacagcctacatggagctgagcagcctgagatctgaggacacggccgtgtattactgtgcaacagacacagtgtgaaaacccacatcctgagagcgtcagaaaccctgaggaatgaggcagctgtgctgaggctgaggagatgacaggatttatgaagtttaaatctgtttagaaaatgggttgagtaattgagtaaaacagcaatggaaagatgtgtacactgtcattatgtaggaaatagtattttcaactgtcaccctataagtaacactcacagagtgggaaaggcagccatcaatcaagctgatgcaaacattcccatgggggctttgtggggacatacattttataattggatctataaatcattagaaacaggattgcttgatctcatggtaagactaaatataatttccaagaagtggccgaaatttcttccaaaatgtctttgcccttccttttacattgaatttattttaaaggagttttaggatcacaacaagtttgagtagaagaaacagagttcccatgcactcctgccccccgacgctcagccttctctgctatcaacaccctgcaccagtgtcataaatcggttacagaggatgaatctccacagacacattggttgtttccttttctggtggtccctggtataacaagcctcaactatcttgaagcaccccaggttcaagtggattcttcaagtgggttactgggaatgatgccaggtagaaggaaagtgggtgggaccattcctctttgcactctttcctcaaggatccataaaatgtacatttacatggagctcctctttctcctggttttatatgcctcttccccaatggtaaggtttcccagtgtttacagcgggggtccccagtccccgtgctgtggatccgttaaggtgtgcagtgcgttaggaactgggccacacagctggagatgagtgggggcgagccagcatcgctgcctgagctctgtctcctgtcggatcagctgtgcattagattctcctacgagccgaattcactttttttatatatatactttaattctagggtacatgtgcataacgtacaggtttgttacataggtatacatgtgctatgttggtttgctgcattcatcgaattctattgtgacctgcacatacaaggggcctagactgagcgctccctatgagaatctaatgcctgacgattgcagggggaacaagttcatcccaaaaccacccaccgccatcatccatggaaaaattctcttctaccaaactgttccctggtgccaaaatggttggggacactggtgtagaggcaggtctgtaccttggaaagccagcagcttctggtgaatcccataattaatgtcctttaatgagaagtggagactttggtcatgagggccttcgtgaataatgccctacagttggattcaaaacattgtaagctcttggggggtgtttctggataaagccctttgtgcagaaaatgcagacacatccatgggatccatgcaggaaaaaagcttcctttacaaagtggtttggcacctggaaggagctctcagggttgggcactgtaccctttgctggctgcactttagccagaggcttaagcctgattggtcttgcagtgggagagccttcctggggtcaaaggttacaaaaatgcctgtcatcttccagctgagcaagcccatctgcgtgcttgtcagtgtcaaccccatgaagggtgcactctggaagatgacaagatgcacacaaacctcctcccactgattatccactaccacacactcagctgcaacccgtgctccagaaacggacaggggcctgcaaggataaacagaatggaagtattttattacctgggaaagcactgccaaatgccacgtttcaggaaggttaactcataagtgttcaggaagtgactgaagggcagtggtgggtgaggtgacgggactgcctcagggctgcacatgaggagggctccctcccacacagccttttcctccaggagctgcaccaggaactcacagaggatcaggaaggattctgagaacattcttctgtggcgctgactagaggggcaaaataaattataaaaaataaatcaattctaaatataatatgatgtttgttattagaaactatttctggatcctgtgggaaccctgacataagccaccattctctgtgaacaaacatttaacctctccttccatggggaggtcgacgagcttggattggttctttcatggatagtatcccccaaactcctctccactccctgcgtatccccgggtctctcagtgacaagttctcctcagtggaatttggttgatgtagtgagatcttcaaatttcctgtcgtctgtgttctcatgttctccccttatctgagattaagaaacgcacctgcatgtagtaaattatagcctactgtctctcatggacaaaataatggccacgccaaccaaccttgtggctgacagcaaccactggcggccaccatcccctccacagcctgtgttggaacatcacctgagagattgtgttagcaactttccttcagaatcatcttaaaaactttgtgtcccatttcacatggagacgtcatttttccatttcatcttcatagagaaatagaaggagaagaataccaaatacacttcctatctccagattattcaaatataattgtccctttatcaccttctgatttctggtcttcacagaatactctacaaatttttctcactggcgttataccaaaagttgtgaagcaccagatactgggattaatttaaccaacattattattctaataattcttagaatttagaattacaattatcatcttttcgtatacggataaactaacctatgcctttgaaaataagcccttacatgagagtgaaaagctatagatttggaggatttccttgcaaatccaatatttggaaaacggattttatcacaaatatacaaattaacttacaattgaacaacaaaaccacagaatttaattttaaaatgggcagagacctgaatagaaaccatatccaaaaaacaaacataaaaagtgatcaacttgattttcattaggtgtacttatgtttaatatttaaaaagttctactaaactatgagaatgggtaaaaattacaaggtagacaatatcagatggtgatgaggaagttgaaaaacaggaactttcaccccttgctggtgggaatgccgaaatggcacatagaaaactacagttaataatttattgtatatttcagaatagctacaagataagatttggaatgttcataacactaagaaataatcagtgatatagatgaaggatatcctagttatccagatttgatcactgcacataaaatgcttttatcaaaatatcagttgtaccacctaaatattttgaaatattgtgtatctatataaatcaaacattaaaaaacaccaatgcagtggaatccagctaattgcagattcccattagatgggatgtgctgcatgatctgtaaactaatcagaatctgtgggtttgtaaaggactttagaaatcaactaggctgcttgtttctaaagataagtctccctagtttaaatattttcttaatgggtggcgattttgaacatagaagaaatagtaatatttgtgtcttgtaagttttcttcttctcgtgtcacgagaaaaggtttgcagggaggaatctgggaccatctttcaagtctcaacttcactgtgattacctcagtaagtattttctgatacccctgactaagataagtctcgtatctgtcctagaaactaaaagtagaattctaagcatctacctgaccagatggacccttcctcttcaccaaggagttccagagacacttttaaacctagctccggccgtgttagaaatagaggatcagaaatgcctcattataccctcctccctttggaattcaagcacaactaaccagcatttttatgaaaacagagcttaaggctcagaaaacagattatttgtagcagtaagataccaaattctaaccttattcgagaatatcatcacaggacagagagcaggcattgaaaggaatcaaaggcttttaccctaaaatatattcctttgacatattttaaaatagccaggcacagttatcttttgtgagagagatttacattctgtagagaatctccttccctttccaggtctttttcttataccgaggagattagctgagggtctagcttcttttaaaggtcttaggagaaaacatttcccagctattgcctctaaaggtggtcacataagagacttcatctacatagtaagaatcttgttctccaaaacctgttatcttaacctagaaacatttttctaccggtttcaggtctttagaaaaaagcttaaatctttcaatcaattgtcaatcagaaaatattcgaactcactgtaagttgtaatccccgccacacactgcctcacttctagctgttttgtctttatggaccaaatcaacatatatctcacatgtattgtttggtgactgtctctctagtacactaaatttaagctgccatcaagccactttgggcacatgttctcaagatcttctggggctgttcacagttcatggtcctcacattcgcctcagaataaatctctctaaatattttgcaaggttgctttttcatcagtagttctaacagaacctactctgtggtttttgttaaaagcattatattaatatagtattagtaatattagtattagttataacacatgttggaaaattcttatgaagttatgcatagactaacaatgggatcaagtgtaaatgtttcaaagtatttaagcaagttatttcaaaatttatcttctgcagatacttctatcagattcattatatcagctaattacttgctttatgatttttgcattttattgtagatgatcacaccctatattttcttggcctttattgtagaaaattgtgtgaaactagtcagggctacatttgcaagtaattgtcgcagtggctgcctgaattgcagtgggtttcctctgcagccaccagtcactcagattactccaatgacaccttaattttgtttcctgcttggctttgggccttagtcttgtgctctccagacagactctgtctttcatctcccctaggtcaggccagagccacatggacctgatgattgtcaatatggtgggaagggtcgcactgaacgggcactctctgtccttctgagggagccatactgcaggcagacatggcagtcctggctcagggtgtgtccttccaagtatccctgcccttccttcaggtgtgatgctgatccatgcatcttcctcccattcctgggtagagggtctccttgttctttccccaatcttctcccagcagccactatgtcttcccactgatgtcttcagcttcctcttttctgcccttcccagcagatgagtctgttattcctgagggaagagagaggaggtgggagatgaggctgttattcctgaaagaatggacagagctttggagcttttctttcttctaccccagtttctacgagttcctccagtgcctgtaacacagagctgtcagtggctttgcccctgcatgttaattctttggtcatgtagtggtggtgagggagctgggtctggatgcatttcagccacagctgctgttccacttccccacacagaaccgtctcaggaggaagaggttggagatttttctgatgtgtcctcaatcctgggagaaaagttttcaatagcaataggaatctctcagttgtatgtccgctgagaatttaaacaataacttctttataatactaaattttaaacaatccaatgaatatatctaatttaattttgtattagcttatgtgacatttgctggcctctcccccagataaggtcatattctcttcctgtttgttcctgcaagtcactgaatttcacaagatgtaaggtctcttgattatactataacatcaataatctggtgtactaaagaaaatgtgctaatttgcagcttactaaaattagttgttttagtaaaaataatatatttgttatagcatgcctacatctccaggctgagtagaagctttgtttgtaatactcagaaactgcaaataacacacatattaaggagctttctaaataaatactatgggtgaattctttaactggaatactgttcctcattagaatcaacacattctttatacacaaccaaattactgactcacaagtaattatactgagcaagaagccacacaaatgaaattgaaaatataagatttcactttaacaaaatcttgaaaaatagatctgaattaacaaagatgagaggttgactcagtatggtgagagggaaataatggggaggcaggaatgagaggaacacagggaggcttttaactgtaatcatcgttatctcgattgttattttggatacacaggtgagcacacgtgaaattacgttttttttccttcggagacatggttttgctttgtcgtccaggctggagctccgtggtgagatcatagctctctgcagcctcagaccctgggtctccagcaatcctcctccctctgccctatgtagctgggactacaggtgtgcaccaccatgctcggcttcagtgcgtattaaaccgcacacttcaattatgcagtatttattatatagcaataatgcctcaataagggtattacaaataagtggatagataatttgttaaagattgatggaaagatagataccaacatgagaaatgtatgacactcaagaaaataaaactgtaggaaacttgcttttctttatatttgttaggtaatcaccacagtgtgtacacatcacaccatgttcccattacagagaaaaggttctgcgaacctcacgagctgtgacccctgtgtgctgggcttggttcagggagaagtcaggtccagtggtgagaagcacaggcccagatgcccaggctcactctgaccaaatgtgagcactggggacattgtaaaacccacctgtgcttttgctgataatttttcatctttaacatggaaataatattgatactatataccatggtttctctgcgtatgtaaaaataaaagatgattggtgctaactttaaaaatatgcagtttatgtagatctatggtacctcaataaaactgttttaaaataaaaattacaaaattataagattttcaggttttaaggtttaagtttatcacaaaacaaactgacaataggaaagcacaatttcccaatgctttcaatatcacagatctccccgaggacattctgacatgctctgagccccactatctccaaaggcctctcaccccagagcttactatatagtaggagatatgcaaatagagccctccgtctgctgatgaaaaccagcccagccctgaccctgcagctctgagagaggagcccagccctgggattttcaggtgttttcatttggtgatcaggactgaacagagagaactcaccatggagtttgggctgagctggctttttcttgtggctattttaaaaggtaattcatggagaaatagaaaaattgagtgtgaatggataagagtgagagaaacagtggatacgtgtggcagtttctgaccagggtttctttttgtttgcaggtgtccagtgtgaggtgcagctgttggagtctgggggaggcttggtacagcctggggggtccctgagactctcctgtgcagcctctggattcacctttagcagctatgccatgagctgggtccgccaggctccagggaaggggctggagtgggtctcagctattagtggtagtggtggtagcacatactacgcagactccgtgaagggccggttcaccatctccagagacaattccaagaacacgctgtatctgcaaatgaacagcctgagagccgaggacacggccgtatattactgtgcgaaagacacagtgaggggaagtcattgtgagcccagacacaaacctccctgcaggaacgatgggggggaaatcagcggcagggggcgctcaggacccgctgatcagagtcatccgcagaggcaggtgcagatggaggctgtttcctgtcagggtgtgggacttcatcttcttctgacagtttctctagtgaacctctctaacctcagaattctgtgcttactaatgtcatctctacgtattttttaaaagatcattttaatatgagcacctattctcacacgcaccaaatgcagattgacgcttacagagatgaaaagttctcaaccatggtcaccaggatgagagtcctgaggaaattcaggggtgcctggtgactcttccgcaatcagtcctgggacagaaacctcagggacagcctttatgagttttgatcacatctaacagagaggatgggccagggccagagtcatgtagaacctcacaggttccacgtctgacccttctcctgacactaaagccaatcagcatcagcactgacctggtgctccttttgctcccaatccatgttctttctttggagagtttcttctcccttttttatttgcttttcctctttcctgaaaaagaaacagatggtccccttggtccacattccagggctcaaggcattttcttggagctcaggtggggctcaggctgtggctcctgcagccacgtgggagaggctgatgggacttccttctctccccattttctcaggaccctctactgtgttgtgtgtaggctcatctgggaatgcagttgaccattaatactgaaggggacaaactcatttgatcaaaatgggatgtggatgtggagttaaccctgttccgtgcacagtgtcagagtcgtctgcttcagaagtagtgttagaaagagctggtgaaatttatcagaatcaagatggagccacttgtgttaaagccctaatgaatgaagctggggaaggccatgaaggagggttctaacacacatattcctgataataagaactaccataaatagactctgcacaaccataaccttgcacagaagccaccacaacattaaaagaattacttctcccattgtatctgcccagcaactccctgttcaactttacaccgatgtgcccctgttattgatccttctagcccaggacaattgtcttaaacagctgatgtgaccctcctcatttttcctttattctttatcttcctataccaacctgaatgcacccatacatttcaattgcaatacacttcctagaatacatattattatattttagagtctctctctctctgttattcagggttgacaagctacagatggacatgccactttctttttttatgactttttttaaaaattttattattcttgtactttaagttttagggtacctgtgaacaatgcaggtttgttacatatgtatacatgtgccatgttgttgtgctccacccattaactcgtcatttagcattaggtatacctcctaatgctctccctccccactacccccaccccacaacagtccctggagtgtgatgttcctcttcctgtgtccatgtgttctcattgttcaattcccacctatgagtgaggaaaaaaatgatgagttcatgtcctttgtagggacacggaagaaactggaaaccatccttctatcattctcagcaaactatcgcaaggacaaaagacatgccacttttctgtgagatgtggaggatgacagtttttggagatgtctgggaatacccagtgtccagaagatcatccatcaataagtgcaggctggaggtcccagagagaggcaaagctgctgaaacaccatggaatttcattttctccagttctgctctgatggaatcaggcccacctgttttgcttgtcttaagtaaattcacagcaccacatatattagtgttgcagtgaataactacaaagtctatcctaaccaagtgtaccatcaaatttaccattacccagagggaagaatctttaacatgagatctatgttcataattttttaaggtgaaaaagtgatcactatccaatcaggcaaatatgattttgctaatgagtggtagatgttgcatgtatttttggatgtcatccctttttcagatgcatggcttgcaattatattttcccattctgtaggttggaattatttccacactttgtagaatctttttgttgtgatgtagttccacctgtttaattctgcttttgttgtctgtgcctttaatgtgaaatataggaaatcattgttaatatattattttctgggtcggggaaattttacaattgcaggccatatgtttaaatatctggcccattcagagtgatttttgtgtttattctaacccaaaattcttaactctttgcatgtgtacatccagtttttctaacacattcatagggagagacttggtttatctgttttatattgtgggttcttatgctgaaaatcagtttgccattgatacatcagtttatttctgagctctttctacatatttatgccaactccatcctgtttttattattctacttttgttattacttttgaaatctggaagtaagatgtaagtttatttttgcctttttacagatgctatagcaaaatattttaacctttcactcttccatataaaagtatggctttaaataatgacttttattatatacaggttatattcttgtattcctaacttttagaggttttattatgagatcttgaattttttaaatgttattttctatgtctggtgagaagttaactgatgcttttcctttattctcttaatttaccacatcagatttattgatttgaagatattgattcatcagcgcatctcaaaaataatttggagcttgtcatggtgtacaatccttttaaagtcttatagaacttagttgactatgaattgggagtagcttgtttatatatactaagaacatttgtcagaagctctttcttgtttattcccagtttgcacttacatatactataaaacataatatataaattttttattcctttcatagttatataatatagcaattacaaagataaaaactgcacttcatcttgattttcccattttgtacagtcttaatttcttcgtatagatttatgttttgaatgtatatcacacggctactagcagagaaagtttgttaaaatgtgcactgaagcatgaatgtgctgacaataaattgtctcaagatctttttgtaatgacagaattttatttgcctttcacttttaatgaaaatgtaatgcacatagaattccagtttgcatttcacttgtaatttattttcttgtgtttattattttgttcatggagatgatcacacattacattctgctgggcctttattaaccacatttctatgaacctagtcagggttggatttcaagtgtatggttgccacggctatcagagttgaagtcagcttctcctgttcacaaaaagttcaggttcctccagtgatacccacttttgtgtcccggtttggctcttcccatttctttctccccagagagagcctgtctctttcatctgtggcaggtgcatcctgctgacacttttacttggtgattgtttgtggggtgaaagggcttggacacagggggatgttctccaaccttctgaccaagcatccttcttagctatgggtggtgagaatggctctgaagcatggtcttccaagcgttcctgttccttcccttccccaagtcagagtgtctctttctagccacagtggtcttccatcagtgtcctcagcttctgacccactgtccttactccacagactcaggatttcattcctcaggaaagagacgggaggtgtttctgggtagagtctccttagtgtcctctgtttccttctgttctagttgattctaccagtgcctgaaggacacaagatttaataaatgtctcccacatatcgtgaagagggattcagcattgaacggagctactgttcttcctccccagtcaacatcacaggacagcaggtggctgagttgtctggggatttctccaattctgtaggaaaagcccgcaagtgccaggagtttcacactctcacagcattagcacacacatcctcaacaactcatgaaacatttccaggttagctttttcctatcttcaataccatacaatgagtggcacctgccccaggtactctaataaatggacctagttttctctgcaggctccccattttctcagatttcaggggtttttttctctgcaacatcaactcagatatgttgaagggttcattttttgtagttcttcaagtttcttgttaatgaggtcagaagaagatcattttctcatttttttttttacattcccgtgcttagtatctgctttctaaataaaattcggaaactaagacaaaatatcaaatatccactatttggtgcattgttaaactatttgagaaatattcatgtactgaaatacaatgaacaattgaaatcaaggcatgcctcagtcacataagaatgtgaggacattatcaaataattgtgctgagtgaaggaagctaaagaattcacagtaaatctcctgtgatttcttttgtataaattgtagaaaatgcaactattctaaattaacatggagaagatctgaatttttctgagaaaagtgtggtgaggtaacaagatggtgaaataaaattacagagaagtgagagaaaaaaatttggaggttaatttaattgctaatagcacgattgaagtgctgattcaaaggctgcacacatataccaacattttccatatcgtacactataaatttgaattcactattgattgaatttttgaataaagcagtaacaaaaatgagtatattggctgaggaagagcaagaaagagatgaatattgacacttgaataatcacggactcctgaaaatacacacatgtgaacactgattgcatatttcaggtaaatactagaaaaagcaaagtcacataaagtcgttatgacaggtgggataccctgcaaatcacactaggcatgtcccacactgccctggagctgtctcaggggagcagtctcctccagtgtttagaggcacaggcacggataatagggctgacgctgtccagatgtgtgatattggacacattgcacaactgctctgttatgtatgtaattcatcttctctaaaaatgtaacattgacacttgcactgaatatattctgcaaatatgtaaacattaaataagatgatgactgctaattgatcatcaagtcacaatcacataatctgaagttatattttcctgagagataggattacctccagtgttttccgggaccctctcatctgctctgggcactgccctctcctccagcgtcccactagagcttgctatatagtaggagacatgcaaatagggccctccctctgctgataaaaaccagccgagcccagaccctgcagctctgggagaagagccccagccccagaattcccaggagtttccattcggtgatcagcactgaacacagaggactcaccatggagtttgggctgagctgggttttccttgttgctattataaaaggtgatttatggagaactagagacattgagtggacgtgagtgagataagcagtgaatatatgtggcagtttctgactaggttgtctctgtgtttgcaggtgtccagtgtcaggtgcagctggtggagtctgggggaggcttggtcaagcctggagggtccctgagactctcctgtgcagcctctggattcaccttcagtgactactacatgagctggatccgccaggctccagggaaggggctggagtgggtttcatacattagtagtagtggtagtaccatatactacgcagactctgtgaagggccgattcaccatctccagggacaacgccaagaactcactgtatctgcaaatgaacagcctgagagccgaggacacggccgtgtattactgtgcgagagacacagtgaggggaagtcagtgtgagcccagacacaaacctccctgcaggggtcccttgggaccaccagggggcgcccgggacactgagcacggggctgtctccagggcaggtgcaggtgctgctgagggctggcttcctgtcgcggtctggggcggcctcgtcgtcaaatttccccaggaacttctccagatttacaattctgtactaacatttgatgtctctaagtggaaaacgtttttgtcctttttgtttctttgtttttgtaacaagaggaaacatcctcagctccacagaagccagggtgtcactttggggacagaaataatcctttcatggtcaccaggataagagtcctgaggaatcccagggaaacctggagagtgttttccagttagactcagggcagagacctccatgggaatctctgattagaacaggccttgagctctgacgggagccaagagagaggctcgcccagggtcagagtccttaaaacctgatggttttcacagctatcccccctcgtcttgtaaactcagactgattcagttgaccctctttctgctaatccatttccttctctgtaggtttgattctcacagttcgctttcttcttctcttccctgaaaacagacgatgtgttttctgtagtcaaaatcccagggctcaggtctgcaggacctgggtaggctacggggactttctcactcaccattgtctggacactcttgtcttctgtgcatggaggcatttggaaaatgaagtggacattagccatgaagggaataatactagttttctccaataggatattgatgtagagctgatcttgtgcttctcacactgtctcagagtttggactttcacctgtgactttgagaagagctggggatgggcactccattgtgctgtgagctctgggtaacgataattgtagaatctgcctaggcagtctaaggtcaatactactggtcatcaggaaagacagctggaattcctgggaagatctgcatctgccgtccaccatggagtcccatcgtcttctgttatgctctctttgaatcagtcccacctagattatctagaacactcttcctgacttaggaaaaataatggcaggctccactaacacctgtgttatgccatgggagcaacacctaagctagtgtgtgaatgagtagatgagactgtggtctagtcaaggtgacaggtaaaattgattgttgccattatgatattttattttatatttggcaatatagtcatgctcctattataaatattttttgagacggagtcttgctctgttgccagcctggagagtgcagcagcacgatctcggctcactgcaacctcttccacctcccaggttcaagcagttctcctgcctcagcctcccgagaaactgggattacaggtgcacgccaccatgcctggctaatttttgtatttttagtatcgacagggtttcaccatgtgggccagtgtggtctcgatttcctgacctcgtgatctgcacacctcggcctcccaaagtgctgggattacaggcatgagccaccacacctggcctagttttattaatgtctgtccataccagcaactacatacctatggggacattaatttacatctgcagacagatgtgtaaatacacaagcctatacatacatgtgtagccatttatatttaacattataataaaataattctaaaatattttctaaagaattaaacttaatgatgagctaaatataaattagagtaatctataattgatttcgatcattctctatagtttgcataaatggatgtctatttctaagccttaacatagtgtattcgtcattttaaaacagtcaagaaaaaattacaaatgttcttgtcacaaaaaaagataaggatttgatgatttgaggtaatatatatgtcaattaacttgattcaattattctgtattgcattcacaaaccataacatacctttgtgccccataaatatatacaaccaaaatttctcaattttcaatgaaattttaattatatatttttaaatctgatgcctctccttggattaagccacctcctcaggcttacagggctcttccattttctcaacatgctgttataccagatgagcacaaacacattaatttcattatgcttagctttaatttttcaaaacaacatgaaggtgataattttaccaatagacgtattgcaacctactatgcatgagaccctttctgtgcttcaaggtttcttctcaggactttatatgtattgcaaattttcatttttttctgatatggaatgctgatttctctttattacagattatcagtttatttttcaaatttatctcttaaaattaattttttcaaagtcccactcaaaccagggtattattagaactttgaagtgtaatagttggaccaactttgagaatacattcaatttagttcacgtgctctcaagtatcttttcttctttaaaagttgttgtcagttgtaatatcacacaaaatattagtaatttatactaatgacacaggttaaaatattgtataaataatttaattacatttgattggaaaaaaggaatatatgttcctcatatcttgacttttttttcttctctatgagatgcatgtttattaattattaagtttaagatgttacccttgtctttttgatttctgggatttaattttagtacatatacttgaatgcattgtattaattcatataataatgttcatattttggatagggttttaatattaattttgttattactgaattttaaactattctacactttttcattttttgtttttatgcgataaaatttacatataagaaaatatgcatagatctggaatgtatcactagagagtttctggcaaatgtgaatacccttgtccccagcacctaaggtagctgaagagcaagtccatccccacatcgcgggtctttccctgtgcctgcggtcaactcctgcatggggaaatgttttgatttctcacactacagatccatttttttccgttttgaactttatataaatggaatcaaacattatagaccttttttttgaaaggggcttcgatatttttgagattaattcatgctatttaatgtataaaattagatcaacatattgtcatttattcaattcatggactgactctgatatgaaacctcaaagttttcatgtatatatggagacagggagaggaaggagaaagattttatatctgagtcagtccattaagtaaataaatgagaatattttgatttattttcctgttgatgtactttaaatttgtttccattttatgaatattataggcaaagccgttacaaatatattagtgtaggttttcctatattgtctcatttttgttgagaaaatatgaagtatatatttctttttttatttttgattactatttatttatattttatattttactttaagttctgggatacatgtgctgaacatgcaggcttcttacgtaagtatgcatgtgccgtggcggtttgctgcacctatcaacctgtcatctaggtttgaagcacctcatgcattaggtatttgtcctaatgctctccctcccctttcctaatgcttttcctcccctgacacatcccagtgtgtgatgttcccctccttgtgtccatgtgttctcattgttcaactcccacttatgagtgagaacatgtggtgtttggttttctgttcctgtgttagtttgccgaggatgatgatttccagcttcatccatgtccctgcaaaggacatggaaatcattcttttttatggctgcatagtagttcatggtgtacatatgccacattttttcatacagtctatcattgatggacatttgagttggttccatgtctttgctattgtaaatagtgctgcaataaacatacatgtgcatatgtctttatagtagaatgatttataatcctttgggtatatagccggtaacaggactgctgggtcaaatggtgtttctcgttctagatccttgaggaatttccacactgtcttccacaatggttgaactgatttacactccccctcaacagtgtaaaagtgttcctatttctccacattctcaccagcatctgttgtttccagactttttaatgatcaacactctaactggcatgagatggtgtctcattgtgattttcatttgcatttctctaatgaccagtgataatgagctttttttcatatgtttgttagctgcataaatgtctttttttgagaagtgtctgttcatgtccttcgctcactttttgatggggttgttttttttttgtaaatttgtttaagttccttgtagattctggatattagacctttgtcagatggatagattgcaaaaattttctcccattctgtaggttgcctgttcattctgatgatagtttcttttgctgagcagaagctctttggtttaattagatcccatttgtcagttttggcttttgtcgtaattgctttggtgttttagtcatgaagcctttgcccatgcctatgtcctgaatgatactgcctatgttttcttctagggtttttgtggttttagattttacatttaagtctttaatgcatctagagttaatttttgtataaggtataaggaagggatccagtttcagttttctccatatggctacccagttttcccagcaccatttattaaatagggatcatttccccatcgcttgtttttgtcaggtttgttgaagatcagatggttgtagatgtgtggtgttatttctgaggcctctgctctgttccattggtctatataactgttttggcaccactaccatgctgtttttgttactgtagccttatagtataatttgaagtcaggtagcatgatgccttcagctttgttctttttgcttaggactatcttggctatacaggctgtttttagttccatatgaagtttaaggtagttttttctggctctgtgaagaaagtcaatggtagcttgatgggaatagcattgattgtataaattactttgggcactatggtcattttcacaatattgattcttcctatccatgagcatggtatttatttattataaaagtaactttaattttttcagttttaatgaggaacaattgaaatatttttaaatgtatatgtttaaggtgcaccacttcatgttttgatattgtgttagtccattctcacactgctataaagaaatgcctgagactgagtaatgtgaaacaaaaaaatagatgtttaattggctcatttttctgcagactgtacaggaagtgtagtggcttctccttctggtgagactcaggaaagttagaatcatagcagaagacaaatagtagtagacacatcacatggccagagcaggggccacaggaagagagggaggtctacacagttagacaaccagatcttatgataactcacacaatattatgagaacagcgccaagagtcagtgctaaaccattcatgaaagacccaccccatgacccaagcatctcccactgggtcccagcttcaggattgaggattataatacaacacgagattcaggccaggacgagttgcaaactgtatcagatacacattgtaaaatgctcatcatgatcaaggtaatttgtgtgcctatcatcccacatacattttttttttaaatggagtgtgtgtgtgtgtgtgtgtgtgtgtgtgtgtgtgatgagaatatctaagatctaccctttcagcaaaaatcacttttacaacacagtattaaatacaggaacattgctgtagattagatctccagaactcattcaacctgcacacctgaaattctgtaccctttaaacatcacccaatttccctctcctcccacatcctgggacccattattttactttctgctttcaagagcttgggtgttttagataccacatgtaaatgagataatgcagcatttgtctttctgcatctggcttattccacttagcatcatgtcctccaggcccatccgtgttgttgcaaatgtcagaatttccttcttttcaaagcctaataaaattcagttttatgtgtacacattttctttatacattcatcagtctgtggtcattaaattattttacaaatctacactattataaataaccttgcaatcagcatgtgtttaacataataattttacttatttgaatacataacaagaagtgggatcaccagatgatatgatagctttatttttcaatttattgagtaaccaatcctaccacaccctaaaaggattctcttttcaccacattcttgccaatatgtgttatatgtcttgctgatgatagccattttaagcagagtgaggtgataactcatcatgattttgatttgaattcctctgataattagtaatgttgagaaccctttgaggctctgtttttcatgtgtgtgttttctgaagaaaaacctatccagtttttgccctttttatcagatcatttgttatttgctattgagttgcatgagttatttatacttttggatagaacttatgtcaggtatataattgcacatagtttttttcctgtgcttttttctattaaattcaaagaaatcatttctgaatcaatgacaggaagtttttttccatgtgttctatgagtttgtggcttcaggttatgttcatttttagtttatttttgaatacggtgttagagaaggtctaattttatttcttttgcatatggatgttaagcttttacatcatatattgaggagactgtccatccttcactgtgtgttcttgggatacaaaatcaggaagatgcataatttaaaaagaaaacatcagatgaatattcctggtgaatatagaccgaaaagttctcaacaaaatactagcaaatagaatccagaagcactttaaaatgtaatacctcatgatcaagtaggctttacccctggaaggcaaggttcattcaacatccacaattcagtaactgtgattcaccatgtaagcagaataaaagcaaaaaccatatgattatctcaatagatgctgagaaagcttttgataggatccaacatccgctcataataaaagccctcaacagactaggcatcaaaaaaacttacctcgaaataataagagccatctatgaccaatccacagtcaacattatactgagtgagcaaaagctcaaaaccctttagaagtgaaagaagaccaagatgccctctcaccactgctattgaacatagtactagaaaccctagtcagagcaaccaagcaatatcaaaataaaaggcagctgatatggtttgtacttgtgtccccactcaaattaaatgtcaaattgtaatacgcagtgttgagggtggggcctgatgaaaggtggttagatcatggggatgagtctctctctcgtgctgatcccatgatagagccctcaggagatctggtttcaaagtacgtggcacctccctcgtctttcttcctcctgctccagccaggtaggacatgatgcttggcgcgggccgcctggccgtcgacatttaggtgacactatagaaggatccgcggaattctctttcttgtttattcccagtttgcacttacatatactataaaacataatatataaattttttattcctttcatagttatataatatagcaattacaaagataaaaactgcacttcatcttgattttcccattttgtacagtcttaatttcttcgtatagatttatgttttgaatgtatatcacacggctactagcagagaaagtttgttaaaatgtgcactgaagcatgaatgtgctgacaataaattgtctcaagatctttttgtaatgacagaattttatttgcctttcacttttaatgaaaatgtaatgcacatagaattccagtttgcatttcacttgtaatttattttcttgtgtttattattttgttcatggagatgatcacacattacattctgctgggcctttattaaccacatttctatgaacctagtcagggttggatttcaagtgtatggttgccacggctatcagagttgaagtcagcttctcctgttcacaaaaagttcaggttcctccagtgatacccacttttgtgtcccggtttggctcttcccatttctttctccccagagagagcctgtctctttcatctgtggcaggtgcatcctgctgacacttttacttggtgattgtttgtggggtgaaagggcttggacacagggggatgttctccaaccttctgaccaagcatccttcttagctatgggtggtgagaatggctctgaagcatggtcttccaagcgttcctgttccttcccttccccaagtcagagtgtctctttctagccacagtggtcttccatcagtgtcctcagcttctgacccactgtccttactccacagactcaggatttcattcctcaggaaagagacgggaggtgtttctgggtagagtctccttagtgtcctctgtttccttctgttctagttgattctaccagtgcctgaaggacacaagatttaataaatgtctcccacatatcgtgaagagggattcagcattgaacggagctactgttcttcctccccagtcaacatcacaggacagcaggtggctgagttgtctggggatttctccaattctgtaggaaaagcccgcaagtgccaggagtttcacactctcacagcattagcacacacatcctcaacaactcatgaaacatttccaggttagctttttcctatcttcaataccatacaatgagtggcacctgccccaggtactctaataaatggacctagttttctctgcaggctccccattttctcagatttcaggggtttttttctctgcaacatcaactcagatatgttgaagggttcattttttgtagttcttcaagtttcttgttaatgaggtcagaagaagatcattttctcatttttttttttacattcccgtgcttagtatctgctttctaaataaaattcggaaactaagacaaaatatcaaatatccactatttggtgcattgttaaactatttgagaaatattcatgtactgaaatacaatgaacaattgaaatcaaggcatgcctcagtcacataagaatgtgaggacattatcaaataattgtgctgagtgaaggaagctaaagaattcacagtaaatctcctgtgatttcttttgtataaattgtagaaaatgcaactattctaaattaacatggagaagatctgaatttttctgagaaaagtgtggtgaggtaacaagatggtgaaataaaattacagagaagtgagagaaaaaaatttggaggttaatttaattgctaatagcacgattgaagtgctgattcaaaggctgcacacatataccaacattttccatatcgtacactataaatttgaattcactattgattgaatttttgaataaagcagtaacaaaaatgagtatattggctgaggaagagcaagaaagagatgaatattgacacttgaataatcacggactcctgaaaatacacacatgtgaacactgattgcatatttcaggtaaatactagaaaaagcaaagtcacataaagtcgttatgacaggtgggataccctgcaaatcacactaggcatgtcccacactgccctggagctgtctcaggggagcagtctcctccagtgtttagaggcacaggcacggataatagggctgacgctgtccagatgtgtgatattggacacattgcacaactgctctgttatgtatgtaattcatcttctctaaaaatgtaacattgacacttgcactgaatatattctgcaaatatgtaaacattaaataagatgatgactgctaattgatcatcaagtcacaatcacataatctgaagttatattttcctgagagataggattacctccagtgttttccgggaccctctcatctgctctgggcactgccctctcctccagcgtcccactagagcttgctatatagtaggagacatgcaaatagggccctccctctgctgataaaaaccagccgagcccagaccctgcagctctgggagaagagccccagccccagaattcccaggagtttccattcggtgatcagcactgaacacagaggactcaccatggagtttgggctgagctgggttttccttgttgctattataaaaggtgatttatggagaactagagacattgagtggacgtgagtgagataagcagtgaatatatgtggcagtttctgactaggttgtctctgtgtttgcaggtgtccagtgtcaggtgcagctggtggagtctgggggaggcttggtcaagcctggagggtccctgagactctcctgtgcagcctctggattcaccttcagtgactactacatgagctggatccgccaggctccagggaaggggctggagtgggtttcatacattagtagtagtggtagtaccatatactacgcagactctgtgaagggccgattcaccatctccagggacaacgccaagaactcactgtatctgcaaatgaacagcctgagagccgaggacacggccgtgtattactgtgcgagagacacagtgaggggaagtcagtgtgagcccagacacaaacctccctgcaggggtcccttgggaccaccagggggcgcccgggacactgagcacggggctgtctccagggcaggtgcaggtgctgctgagggctggcttcctgtcgcggtctggggcggcctcgtcgtcaaatttccccaggaacttctccagatttacaattctgtactaacatttgatgtctctaagtggaaaacgtttttgtcctttttgtttctttgtttttgtaacaagaggaaacatcctcagctccacagaagccagggtgtcactttggggacagaaataatcctttcatggtcaccaggataagagtcctgaggaatcccagggaaacctggagagtgttttccagttagactcagggcagagacctccatgggaatctctgattagaacaggccttgagctctgacgggagccaagagagaggctcgcccagggtcagagtccttaaaacctgatggttttcacagctatcccccctcgtcttgtaaactcagactgattcagttgaccctctttctgctaatccatttccttctctgtaggtttgattctcacagttcgctttcttcttctcttccctgaaaacagacgatgtgttttctgtagtcaaaatcccagggctcaggtctgcaggacctgggtaggctacggggactttctcactcaccattgtctggacactcttgtcttctgtgcatggaggcatttggaaaatgaagtggacattagccatgaagggaataatactagttttctccaataggatattgatgtagagctgatcttgtgcttctcacactgtctcagagtttggactttcacctgtgactttgagaagagctggggatgggcactccattgtgctgtgagctctgggtaacgataattgtagaatctgcctaggcagtctaaggtcaatactactggtcatcaggaaagacagctggaattcctgggaagatctgcatctgccgtccaccatggagtcccatcgtcttctgttatgctctctttgaatcagtcccacctagattatctagaacactcttcctgacttaggaaaaataatggcaggctccactaacacctgtgttatgccatgggagcaacacctaagctagtgtgtgaatgagtagatgagactgtggtctagtcaaggtgacaggtaaaattgattgttgccattatgatattttattttatatttggcaatatagtcatgctcctattataaatattttttgagacggagtcttgctctgttgccagcctggagagtgcagcagcacgatctcggctcactgcaacctcttccacctcccaggttcaagcagttctcctgcctcagcctcccgagaaactgggattacaggtgcacgccaccatgcctggctaatttttgtatttttagtatcgacagggtttcaccatgtgggccagtgtggtctcgatttcctgacctcgtgatctgcacacctcggcctcccaaagtgctgggattacaggcatgagccaccacacctggcctagttttattaatgtctgtccataccagcaactacatacctatggggacattaatttacatctgcagacagatgtgtaaatacacaagcctatacatacatgtgtagccatttatatttaacattataataaaataattctaaaatattttctaaagaattaaacttaatgatgagctaaatataaattagagtaatctataattgatttcgatcattctctatagtttgcataaatggatgtctatttctaagccttaacatagtgtattcgtcattttaaaacagtcaagaaaaaattacaaatgttcttgtcacaaaaaaagataaggatttgatgatttgaggtaatatatatgtcaattaacttgattcaattattctgtattgcattcacaaaccataacatacctttgtgccccataaatatatacaaccaaaatttctcaattttcaatgaaattttaattatatatttttaaatctgatgcctctccttggattaagccacctcctcaggcttacagggctcttccattttctcaacatgctgttataccagatgagcacaaacacattaatttcattatgcttagctttaatttttcaaaacaacatgaaggtgataattttaccaatagacgtattgcaacctactatgcatgagaccctttctgtgcttcaaggtttcttctcaggactttatatgtattgcaaattttcatttttttctgatatggaatgctgatttctctttattacagattatcagtttatttttcaaatttatctcttaaaattaattttttcaaagtcccactcaaaccagggtattattagaactttgaagtgtaatagttggaccaactttgagaatacattcaatttagttcacgtgctctcaagtatcttttcttctttaaaagttgttgtcagttgtaatatcacacaaaatattagtaatttatactaatgacacaggttaaaatattgtataaataatttaattacatttgattggaaaaaaggaatatatgttcctcatatcttgacttttttttcttctctatgagatgcatgtttattaattattaagtttaagatgttacccttgtctttttgatttctgggatttaattttagtacatatacttgaatgcattgtattaattcatataataatgttcatattttggatagggttttaatattaattttgttattactgaattttaaactattctacactttttcattttttgtttttatgcgataaaatttacatataagaaaatatgcatagatctggaatgtatcactagagagtttctggcaaatgtgaatacccttgtccccagcacctaaggtagctgaagagcaagtccatccccacatcgcgggtctttccctgtgcctgcggtcaactcctgcatggggaaatgttttgatttctcacactacagatccatttttttccgttttgaactttatataaatggaatcaaacattatagaccttttttttgaaaggggcttcgatatttttgagattaattcatgctatttaatgtataaaattagatcaacatattgtcatttattcaattcatggactgactctgatatgaaacctcaaagttttcatgtatatatggagacagggagaggaaggagaaagattttatatctgagtcagtccattaagtaaataaatgagaatattttgatttattttcctgttgatgtactttaaatttgtttccattttatgaatattataggcaaagccgttacaaatatattagtgtaggttttcctatattgtctcatttttgttgagaaaatatgaagtatatatttctttttttatttttgattactatttatttatattttatattttactttaagttctgggatacatgtgctgaacatgcaggcttcttacgtaagtatgcatgtgccgtggcggtttgctgcacctatcaacctgtcatctaggtttgaagcacctcatgcattaggtatttgtcctaatgctctccctcccctttcctaatgcttttcctcccctgacacatcccagtgtgtgatgttcccctccttgtgtccatgtgttctcattgttcaactcccacttatgagtgagaacatgtggtgtttggttttctgttcctgtgttagtttgccgaggatgatgatttccagcttcatccatgtccctgcaaaggacatggaaatcattcttttttatggctgcatagtagttcatggtgtacatatgccacattttttcatacagtctatcattgatggacatttgagttggttccatgtctttgctattgtaaatagtgctgcaataaacatacatgtgcatatgtctttatagtagaatgatttataatcctttgggtatatagccggtaacaggactgctgggtcaaatggtgtttctcgttctagatccttgaggaatttccacactgtcttccacaatggttgaactgatttacactccccctcaacagtgtaaaagtgttcctatttctccacattctcaccagcatctgttgtttccagactttttaatgatcaacactctaactggcatgagatggtgtctcattgtgattttcatttgcatttctctaatgaccagtgataatgagctttttttcatatgtttgttagctgcataaatgtctttttttgagaagtgtctgttcatgtccttcgctcactttttgatggggttgttttttttttgtaaatttgtttaagttccttgtagattctggatattagacctttgtcagatggatagattgcaaaaattttctcccattctgtaggttgcctgttcattctgatgatagtttcttttgctgagcagaagctctttggtttaattagatcccatttgtcagttttggcttttgtcgtaattgctttggtgttttagtcatgaagcctttgcccatgcctatgtcctgaatgatactgcctatgttttcttctagggtttttgtggttttagattttacatttaagtctttaatgcatctagagttaatttttgtataaggtataaggaagggatccagtttcagttttctccatatggctacccagttttcccagcaccatttattaaatagggatcatttccccatcgcttgtttttgtcaggtttgttgaagatcagatggttgtagatgtgtggtgttatttctgaggcctctgctctgttccattggtctatataactgttttggcaccactaccatgctgtttttgttactgtagccttatagtataatttgaagtcaggtagcatgatgccttcagctttgttctttttgcttaggactatcttggctatacaggctgtttttagttccatatgaagtttaaggtagttttttctggctctgtgaagaaagtcaatggtagcttgatgggaatagcattgattgtataaattactttgggcactatggtcattttcacaatattgattcttcctatccatgagcatggtatttatttattataaaagtaactttaattttttcagttttaatgaggaacaattgaaatatttttaaatgtatatgtttaaggtgcaccacttcatgttttgatattgtgttagtccattctcacactgctataaagaaatgcctgagactgagtaatgtgaaacaaaaaaatagatgtttaattggctcatttttctgcagactgtacaggaagtgtagtggcttctccttctggtgagactcaggaaagttagaatcatagcagaagacaaatagtagtagacacatcacatggccagagcaggggccacaggaagagagggaggtctacacagttagacaaccagatcttatgataactcacacaatattatgagaacagcgccaagagtcagtgctaaaccattcatgaaagacccaccccatgacccaagcatctcccactgggtcccagcttcaggattgaggattataatacaacacgagattcaggccaggacgagttgcaaactgtatcagatacacattgtaaaatgctcatcatgatcaaggtaatttgtgtgcctatcatcccacatacattttttttttaaatggagtgtgtgtgtgtgtgtgtgtgtgtgtgtgtgtgtgatgagaatatctaagatctaccctttcagcaaaaatcacttttacaacacagtattaaatacaggaacattgctgtagattagatctccagaactcattcaacctgcacacctgaaattctgtaccctttaaacatcacccaatttccctctcctcccacatcctgggacccattattttactttctgctttcaagagcttgggtgttttagataccacatgtaaatgagataatgcagcatttgtctttctgcatctggcttattccacttagcatcatgtcctccaggcccatccgtgttgttgcaaatgtcagaatttccttcttttcaaagcctaataaaattcagttttatgtgtacacattttctttatacattcatcagtctgtggtcattaaattattttacaaatctacactattataaataaccttgcaatcagcatgtgtttaacataataattttacttatttgaatacataacaagaagtgggatcaccagatgatatgatagctttatttttcaatttattgagtaaccaatcctaccacaccctaaaaggattctcttttcaccacattcttgccaatatgtgttatatgtcttgctgatgatagccattttaagcagagtgaggtgataactcatcatgattttgatttgaattcctctgataattagtaatgttgagaaccctttgaggctctgtttttcatgtgtgtgttttctgaagaaaaacctatccagtttttgccctttttatcagatcatttgttatttgctattgagttgcatgagttatttatacttttggatagaacttatgtcaggtatataattgcacatagtttttttcctgtgcttttttctattaaattcaaagaaatcatttctgaatcaatgacaggaagtttttttccatgtgttctatgagtttgtggcttcaggttatgttcatttttagtttatttttgaatacggtgttagagaaggtctaattttatttcttttgcatatggatgttaagcttttacatcatatattgaggagactgtccatccttcactgtgtgttcttgggatacaaaatcaggaagatgcataatttaaaaagaaaacatcagatgaatattcctggtgaatatagaccgaaaagttctcaacaaaatactagcaaatagaatccagaagcactttaaaatgtaatacctcatgatcaagtaggctttacccctggaaggcaaggttcattcaacatccacaattcagtaactgtgattcaccatgtaagcagaataaaagcaaaaaccatatgattatctcaatagatgctgagaaagcttttgataggatccaacatccgctcataataaaagccctcaacagactaggcatcaaaaaaacttacctcgaaataataagagccatctatgaccaatccacagtcaacattatactgagtgagcaaaagctcaaaaccctttagaagtgaaagaagaccaagatgccctctcaccactgctattgaacatagtactagaaaccctagtcagagcaaccaagcaatatcaaaataaaaggcagctgatatggtttgtacttgtgtccccactcaaattaaatgtcaaattgtaatacgcagtgttgagggtggggcctgatgaaaggtggttagatcatggggatgagtctctctctcgtgctgatcccatgatagagccctcaggagatctggtttcaaagtacgtggcacctccctcgtctttcttcctcctgctccagccaggtaggacatgatgcttccctttctgtactgattgtcaggatcctgaggcctccccagccatgcttcctgtatagcctgaagaaccatgaaacaattaaaaatctttataaattacacagtctcaggtgtttctttatagtttgcgaatggactaatacagaatccaaataggaaaagaagaactcaatgtatctctccaaactgatgatataattctatacctagaaaattctaaagaccctgccaaaataattctagaatagataaacaattttggtaaagtgttgggatacaaaatcaatgtacaaaaatcactagcatttctataccccaactatgtccaagctgagactgaaatcaagaacacaatcctatcccacttacaatattcacacacacaaaatatgaaatgcctggaaatacaggtaacaaacaaggtgaaggatctctgcaaggagaactacaaaatacagcagaaataaataaataaatcgtacatgacacatgactcatctgacaaagggctaatatccagaatctacaatgaacttaaacaaatttacaagaaaaacaaacaaccccatcaaaaagcgggcaaaggatatgaatagacacttctcaaaagaagacatttatggagccaacagacacatgaaaaaatgctcatcatcactggccatcagaggaatgcaaatcaaaaccacaatgagataccatctcacaccagctagaatggcgatcattaaaaagtcagggaacaacaggcgctggaggggatgtggagaaataggaacacttttacactgctggtgggactgtaaactagttcaaccattgtggaagacagtgtggcgatcctcaaggatctagaactagaaataccatttgacccagcagtcccattacttgctatatacccaaaggattataaatcatgctgctataaagacacatgcacacttatgtttattgtgtcactattgacaatagcaaagacttggagccagcccaaatgtccaccagtgatagactggattaagaaaatgtggcacatatacaccatggaatactatgcagccataaaaaaggatgagttcatgtcctttgtagggacatggatgaaaatggaaaccatcattctgtgcaaactatcacaaggacagaaaaccaaacactgcatgttctcattcataggtgggaactgaacagtgagaacatttggactcaaggtggggaacatcacacaccggggcccgtcatggggtcgtgggagtggggagggatagcattaggagatatacctaatgtaatgttaatgggtgcagcacaccaacatagcacatgtatacatatgtagcaaacctgcacattgtgcacatggaccctagaacttaaagtattatttaaaaagaaagaaaaaaactattaatttttctgaaccatgaacatggaatatttcagatatattttcaatttgtgtgtgttcactttattttttattatcaatcatttctggttttcttttagaaatctttcacttatttggtaatatgaaatataatttttagctattataaacaaaatgctttattgattttttgctgtttgcatttagcaatgccaccaatttttgtatgtaggtgttgtattctgcaaatttacagaattttttatcaattataacagtttttccagcaccatttattaaatagggaatcgtttccccatttcttgtttttgtcaggtttgtcaaagatcagatggtcgtagatatgcagcattatttctgagggctctgttctgttccattggtctatatctctgttttggtaccagtaccatgctgttttggttactgtagccttgtagcatagcttgaagtcaggtagcgtgatgcctccatctttgttgttttggcttaggattgagttggcaatgcaggctcttttttgttccatatgaactttaaagtagttttttccaattctgtgaagaaagtcattgatggggatggcatcgaatctataaattaccttgggcagtatggccattttcacgatattgattcttgctacccatgagcatggaatgttcttccatttctttgtgtcctcttttatttcattgagcagtggtttgtagttctccttgaagaggtccttcacatcccttgtaagttggattcctaggtgttttattctctttgaagcaattgtgaatgggagttcactcatgatttggctctctgtttgtctgttattggtgtataagaatgctagtgatttttgcacactgattttgtaccctgagacttcactgatgttgcctattagcttagggagatttggggctgagacaatggggttttctagatatacaatcatgtcatctgcaaacagggacaatttgacttcctcttttcctaatcgaataccctttatttccttctcctgcctgattgccctggccagaatatgtagaaagctgaaactggatcccttccttgcaccttatacaaaaattaattcaagatggattaaagacttaaatgttagatctaaaaccataaaaaccctagaagaaaacctaagcaataccattcaggacataggcatgggcaaggacttcatgtctaaaacagcaaaagcaatggcaacaaaagccaaaattgacaaatgggatctaattaagctaaagagcttctgcacagcaaaagaaactatcatcagagtgaacaggcaaccaacagaatgggagaaaacttttgcgatctactcatctgacaaagggctaatatccagaatctacaatgaactcaaacaaatttacaagaaaaaaacaaacaaccccatcaaaaagtgggtgaaggatatgaacagacacttctcaaaagaagacatttatgcagccaacagacacatgaaaaaatgctcatcatcactggccatcagagaaatgcaaatcaaaaccacaatgagataccatctcacaccagttgggatggcgatcattaaaaagtcagggaacaacaggcgctggagaggatatggagaaataggaacacttttacactgttggtgggactgtaaactagttcaaccattgtggaagacagtgtggcgatcctcaaggatctagaactagaaataccatttgacccagcagtcccattacttgctatatacccaaaggattataaatcatgctgctataaagacacatgcacacttatgtttattgtgtcactattgacaatagcaaagacttggagccaacccaaatgtccaccagtgatagactggattaagaaaatgtggcacatatacaccatggaatactatgcagccataaaaaaggatgagttcatgtcctttgtggggacatggatgaaaatggaaaccatcattctgtgcaaactatcacaaggacagaaaaccaaacactgcatgttctcattcataggtgggaactgaacaatgagaacatttggtctcaaggtggggaacatcacacaccggggcccgtcatggggtcgtgggagtggggagggatagcattaggagatatacctaatggtaaatgacaagttaataggtgcagcacaccaacgtggcacacgtatacatatgtaactaacctgcacattgtgcacatgtaccctaaaacttaaagtataataaaaaaaagaaaaaagagacccaattgttgacaaagttatgaaaaagatagtttttaaggagtctttaagtaatattgtattttctgcaaacagacaatttgatttcccctattccaaatttcaggacatttcttcttttttcttgtcaaattgttctggctagaattacagtaccatgtagaagtggtggaaaagagcatttttgtcttgttcaacatcttagagaaaaggctttcagtttttccagccttggtataatgcaagctgtgggtttcacatatctggactttattattttgagatatgtttcttgtataccaagtttgttgagaatttctataaggaatggaggttgaatttttttctatgactttcttaaagcaattaatcataaaataataataagcaggtcaatacaagatccataaattagtggaagctagttatttgcactgctgccatagagtaggatcactacacaactcatggtgttgatgggaaactataattctgcaataattaaagactagtgatttacactgggctctattgagagatttggttgtcaactacagaaatcgagatgaaggggcactgagaaacatttcgcttcatatcatctcaacttctaatatcaatttttagtactaatacagtcctattttctcagtatactgtctcacaggttatagtatatgtcttagaaaattaagggttgtttcattctaataattaactcagaaaaattcatttcctattatggatgacaagtgtaaattcatatcttaataattacccacactccaaaacactactacaggcaaaggcaagagaaaggcaggtatagatgagattctctgaggtcagttatgtaaatacccaaggactattgtctatgaccttgaatgtcactttcttcccttccatgagctacatccaggatattctgtgaatctgagagcgttgagcatgtttaattattttatctcactgccccttagtcttgctttctccagttgacaaccaaatctctcaacaataggcccagcgtaaatcaccagacttcaattattgtagaactatggtttcccaacaacattatgagttacaaaatgatactactttatggcagcagtgaaaatgatgaacttccactaacttatgaatctctgaatggctagcatggaggtgtgtatgtatcagcgcactgttctagaaatgttccgtttctgtccattattttatgtagtaatgaggacaacgtgaactaaagggagtatccatggccttataagcacagagaccacatccagtgcaggtgcagagcaaggctgcaacagtcagcaagttgctctctgaagagtcttccaattcccttgcccaaagcatctgctcattcatgggctgagaaaagggaagtcatgcatgcagtctactctctctacagagctgacaggggacacggacaacatcgattattcatggaattttcccataggaatgcagctgtgtgcacacacacataatacatttttaaatgttttttttatttatcctctccaattttaaaaaagtcatcaccttttctcctaatcaaagaggattttgaccagaatgcttggtgggagccccctgctctcccagatgcccacccttatttctcttgaagtgaagaacggcagctctcttgatttctactctcatcctctaggactaaaaccagaaggttccacgccccctgggtgaacatccaagaagaccctgtctgtagcagcaggagcctcaagccttgactgagagctatggtcctgaaatgagacagtgtcccccatggagagcacacgtggacgcccacaactgagggctcactgctcttcaccacagatgcgctcccttactgagtcctgagacctgagtgcaccccatagggtagggctcagaagaggggatgcaaatctccaccagctccacccttctctgtgttgaaaagccgagcatggggacctagttcagtgactcctgtgccccaccacatggagctttactccacgcttctcctgctgactgtcccttcctgtgagttcagtggtcagggaatccttcaggggtgaaacacctgttcttttctttgtgggcttcatcttcttatgctttctccacaggggtcttatcccaggtcaccttgaaggagtctggtcctgcactggtgaaacccacacagaccctcatgctgacctgcaccttctctgggttctcactcagcacttctggaatgggtgtgggttagatctgtcagccctcagcaaaggccctggagtggcttgcacacatttattagaatgataataaatactacagcccatctctgaagagtaggctcattatctccaaggacacctccaagaatgaagtggttctaacagtgatcaacatggacattgtggacacagccacacattactgtgcaaggagaccacagagacagagcccagggtgcctcttgtacaagaacccaggctgcttctcagtggcgctccctccccacctctgcagaacaggaaagtgtggctgagatgccatttcctgtcagggtctgggtgtcttatcctatctgactcagagccttgtcttcctccctcttctttagtaataaatggcatgacccctgttagtggttcatgcaagcagaggctgtatcctgtttgacaaagattcagcatgaaaggttcctgttacttgagccagatgcatcactgatatgtggccaccagtttcttagactcataccactttaagggaccaaatacaaatgtccatagcatatgccattcttaaactgcagaaatgatgtcaaagaagaatgtggagataagagagcaggaggaattatgaaaatctggatagcatcttctcttctagggtggaaggtatgctagtaaagtaatttaatgaaacaatcagacagatgcaatatgtcctcatcatggagtgtctcacatgggcagtgcacaaataaatttctaaaaattccataaggtagatgtgatggatgaggcttatttccacacagggagcccacaaatatccagagaagtaaaaaatctgacacttggaaagaaaattgcctcatcttgacatcagaaacccatttcaacatgtccgaggggcaatgtggaaaagaaatggaaacttcaaaaacacatttcttatgaaatgtctagctcatgtttgaacataaaaacagaattgtccatgattttagaaaaaccaacccatgacagcgagtcactacactcagaaacaccactgagtcaacagacttcagtctgtgagcaggtcagtactgaggccccaggtgaatcaaggctctcacgtacattgtacagaacccagaattgagccacacaatctataaccaagtcttctttgacaaactttacaaaaattaacaaaaaaatacaccagagaaattcaatatatgaaattcaatatacccattcaatatatggtgctggggaaattggttagccacgtgcagaagaacaaaactagacccccaccctcaacacatatatactcaacacaaaatgaattaaagacttacatataagacctcaaactataaatctactcaaacaaaacaccaggacaactcttctgggctttggcctaggtaaagaatttatgactaagaccccaaaagcaaatccaagaaaaaaatagacaaatgggacttaattaacctaaagcatttttcacagcaccggagtgaacagacaagttgcagagcgaaagaaaatttttccacaccacacctgtgacagggaactaatatgaagaatttgcaaggaactcaaactactctacaacaacaacagcaacaagaaccaaataactccgttaaaattagcagaggacatgagtagacattttcaaaagaacacataaaaatggataataaatatataaactacgctcaacatcactcatcatcagggaaatgcaaattaaaaccacaataagatatcatcttccaccagtcacaatgactattactaaaaactcaaaaatatcagatgttggtgaagatggaaaggaaagggaactcttagacactgttgatgaggatgtggatgaggacaacttctatggaaaatggtatggagatttcccaaaaaactagaaatagaactcccctttgatccagcaatcccactactgggtttactacccaaaggaaaataattttttatttccaaaagatatccacacttctatgtttatcacaaaactattatcaacagcacatatgtcaacctgagtgtccaccaacagatgattttataaaagaatatagcatatatgcacaattcaatactagtcagccacaataaggaatgaaactgtcttttgcagcaatatgcatagaactggaagacaacataattagtgacctaactcacaaacagagagtcacatgtcacatgttattatttataagtggaaggtaacaacgtgtccacaaggatatggagagagaaatgatggacaccagagacttagaaggatgggaggtggaaggtgggagcatgaggagacattacctagtgggtacaatgtacattatttgggtgatagtacactaaaagccaagaccactatggaatatagccatgtccaaaagtggcattcgtagtccttaagtttatacaagtaaatgtacacacaaataaaattaaaaatataaaataattaacagttgaccaatgatcttaaaagttgatttaaaatataatcaataaatgaaatgaatatcagttgaacctcattaaatttgaaaacgttttatactcaaatgactataagaaaatgaatgtcaagtttcagatgagaaactgtttgcaaatcattagccaccaacataagtataataagaaccctcagaactcaactgtgaaaaaaagaaacaacccatggatagaataggcaaaggtttgtgcagacatttcatcaaataagatgtacagatgacacataggcatataaatgggctcgcaacaggattttccattcgaaaaattcaaatcaagccgacagtgagacactactatacaatttttagaaattaagaagaaatacagataataccaatgctggtgagcatatcagggtccaagactctaaaacgttgcaaacaggaatgcaaaatgaaactgctactcaggaaaataatttatagttttttctaaaatcaaacattttcttaatatatgacctaaatatcccactcctgaatatttgtgtcagagaaatacaatcttagattcacaacaaacttccatttaaatgttcaatatattgtgctcacgtgtgtgtgtgcacgatagaaacaaaaagtaacatgaatgtctcaaaatttgaataggtaaaaagtaggaagtgtctattaattgaataccatcagcaataaaaaataacaaaatgactgatacacaaaccattacaggtgaactccagacatgatgctaagtgagagaagccagtctcaatgatcaaagggacacatctgtaagcaccacggtcatcctcaggtgtcagtggtttgggctgggctctctgtctctttcctgaccagacccagatgttgagctccgccacttgcagatggaaaattctactattttcaacaatgcactgaggtttgaactgcttcacagactgaacgaaacaaacacgggctcctttgaacagtgtgcagcatttgttccaaccacaagagaatgtctcccagctctgccccttctcagttttccctgcaagccagcagccctgcagtttagcctgcatctcccatgcatgcacccatctccttccaagggccttactccacaacctccacttattttgagtgcactgactggctttgaacttttccacattctgttgttattgaagttaggatgtttagagccatattaaggatcatattttatgactgaattccagtgccccctctctcctgggacagagcacgtaaccaacattctgcatgtggagacaaagatgagcttttttcttcctcagcctaggagatgagcgctcagtggagggttggatagaagcttcccaccttctcagcactccagttctggtggggagaacctctgccataggagcagagctagaaaccagggaccgaatgttcccagtgacactggacccagggtagagcctccatccacgagtggggctccatggaagaagcgagtctctggctctcagtagcttttgtccagaactgagccttaggatcgtgtactgtgggcagagtcagagggccaatgtcctggctcctggggaacagtttcctctgaagggagctgggtagaaggtgtcctgtcttcttggctacatctgtttgcagtggagtttacatcatgctgagttgggatgtggaaggaaggaggagcatcttagatcaattatgatggctagacttactgaattttgtagattttcttgaataaatgtttcttcacttgctgtatgctgtgagagcctttccaaaccctgtattttttcaaaataattttcactggtctcatgagggcatggattcattgagcccctcatgctatcaaagagaaatagaactttttttgttcactttttagagaacatccatgggttataaaacaatgggttgacttctcttccaaaactttacagataccgtcaattttcctcttgcttgtaaggttttatccagaagaatgctgtcatcattttttctgcttttttggaaggaatgccccttctactcacctcaaattgcctgcatgtatttctatttttctttggttttcagcagttttaataagatttagctaaatgtgtgtggggggagcagggagtgtcattctgctgttctgtgttctctgagatgcatggattcacggtttactctgtctccattttggggaacacaattagaaaaaatgtcagtgtgagcccagaaacaagcctccctgaagtgggcagaggaccacctgggggcgctcaggacccactgagcacaagagccagccccagggcaggtgcagacgggggttaagatctggtttcccgtcagccctgtggcttcctctccataaaacagttccctcgggggcacgtctctggattccttatcttgttcttactgtgaagtctctgaagaataaacatttgttgtaacaagagaaaaattttctcccatgcaccaaaggcagagtcacctacagtcaattagtcctgtttctcaatgttaataaactatcaatgtttctgaaggtacattgtacagaacccagaattcagccacacaatgtatagccaagtgatattgacaaacttaacaaaatatacaccagggaaaggacgtcccattcaataaatggtacttgggaaaatggatagaaacatgcagaagaacaaaactagatccccaccctcaacacattagtcaggtctctaaaatgcaggagtacatatctaaaatttattattttattgtgcatttttacgtgttccagaaggtgggagaaatttctttctgtgaagagcatcccaaagtcaggcactcctctagaacacgtgtttaatccttgtctttggcttattgatgagctctgttggctgcaataacttctgccatccgggctgactttgcatcatgtagaggagcaaattctgaatgaaagtttgcactactcaattgagtgcataacctacagttttgttactgatgtatgattcatcagagatgatatcagatcaaggatttcaatgagaatctaatctaaaagatgtaaacaaattttcctaatttagataaaattactgtgagcacactgctagtattcagccatgtctcctatcacattgaatctacactaagtttgacctaaaagctagcacttgttctcatgttccaatatgttatttttattttaatgtattcagattactatgtgttgctattttacccaaagtgaaggaaagcaattttaactgactgaaaatgagaaaaagcacaacctaatgaaatggaagtcaggacatgagtgtctccagccttgtctatttcaaaaattcacgtacgcagggggatttctttcctcaattttacacagagaaacttccaaaatgtttgtttcctctcccatggactctatcatcagtttctatgtcagtttgcttagaattttggcctccagctccaaccaatttggtgcaaaaacatgatttcattcttttttatagctgcagagtattgcactgtgtataagtaccatgttttctttatgcagtctataactgatgggcgtctaggttgattccctgtattaggtaatgtgaattgcacagagataaacacatgagtggatgtgtctttgtgttacaatgattggttttctcttgggcatatacccagtaatgagattgctgaggggaatagtagctctgttttaagttctttgagaaatctctagactgactgaattgttttctctgtgaatggtgataattatgtcaatatttgtcaaattttgaatgtattgtttgaagattgttatttgtcaatattacctcattaaaactattaaaaatggaagtgtataatttggtagaaaaggattaaaagaaagataaaaataatacaagaaaagtcacagactcctgaatccacatgtgaattagcactcagtttttctatattatttataaaaacactaagatacagccaaataatatcatgatatccttataagaagagtgtttcgtaaacctcactgggaatttctagctctgtcctagagttaatttagggagcagtcggatccagtcctgagcaacacaggccagacactgagacttaccacatcttaccagatgtgagctcttagacacgtcacatggcctctccatgcttgggggtttaccttcacatctgtaaatgaaggaaacattgactgccacagaacatacttcatgtgcatctatacagtagaaatgctaataagaattaattgtttatgaagtgtaatcactctgggacacagcccactcagaggcatcccttccagaacccgctatatagtaggagacatgcaaatagggccctccctctgctgatgaaaaccagcccagccctgaccctgcagctctgggagaggagccccagccctgagattcccaggtgtttccattcagtgatcagcactgaacacagaggactcaccatggagttgggactgagctggattttccttttggctattttaaaaggtgattcatggagaaatagagagattgagtgtgagtggacatgagtggatttgtgtggcagtttctgaccttggtgtctctgtgtttgcaggtgtccagtgtgaagtgcagctggtggagtctgggggaggcttggtacagcctggcaggtccctgagactctcctgtgcagcctctggattcacctttgatgattatgccatgcactgggtccggcaagctccagggaagggcctggagtgggtctcaggtattagttggaatagtggtagcataggctatgcggactctgtgaagggccgattcaccatctccagagacaacgccaagaactccctgtatctgcaaatgaacagtctgagagctgaggacacggccttgtattactgtgcaaaagatacacagtgaggggaagtcagcgagagcccagacaaaaacctcctgcaggaagacaggaggggcctgggctgcagagggcactcaagacacactgaaaacacggttaacactgggacaagttgctcaggaaggttaagggctggtttcctttcagagtctttgctgtttctgtatctaacagtttccccaggaaccctgtctagatttgcgatcttgatctgcttaaactgtctctgtgtcatttttcttacctgtgactttaggggagctgatcgtggacactccagtgtgtggagatttcctggtgacagcaattgtgtgttctgtctaagcatgtctagggccggtcatcaggaaggacaggaaggacaggctggaattcttggaaacagctgcacctgccatccaccagggaactttattgtcttctgttctgctaaaattaaatcaggcacaccaagtttaactagcactatcttcctagcttaagaaaattgatggcaggtttcaataacacctatattaaaccttcagagcaacacctacattagtgtctgatttgataattgagactatgttctagccaagcagacacataaaactggtgattgccatgcttagttcatatttcatatttatcaatagaatctggctggtgttataaacagatttgccaacacatgtgtgttagtgtttgtcttcggagaggcacattctatgactggattaagtttgtgtacaggttcctaaggaacctgttcatgcttttgagaggaaatgcagagggggtggaaggcggctggggaagctgaaggtatacgagggaagtcagtccctgagtgaaggagagagggaggagaactgggtagaactttcctaaacttctgtgctggtctaggaaggtccagcaagatcactgagtcagattcgtgtcaaagtttcccatcggggacccccgtgactcccagcagtggctctgctcagatcagcacagagctcgttcttctcctgagagtggagcagaggatgtggctccagcaccagccatggcatggacgtcagagagcagccccaggcacctgagtcgggtgcattgtgccccctgcaggtggacggagggaggtgctgactcagggcccacacgctgtgggttctatacagaacacacacttttacttcatttctgtggatgacatagaaacaaacatgcagtctattaacagcggtgattcctacatttgccccaattgctttattccttgattccgcagaatatcctgacgcagaattgtctttctctcgtggaattgcgacgtgtttaggacgtgtgttccccactttcagtgttctgctccatgaacagagatcctgagtagagtacagctgaccctccttccacactgttcctctcctccccacaggaagagcagataattacctgaggctgaatctgaggtgggatctgtcctctgaacctcagagcctgcagagacccccggctgcagattcatggagtcaggtgtttgtacatgtgggaaacttgagctgttcttttgtcagtgaacactccttagaactaattgtgggttcagaattaggacacccattgatctatcacacctcagctcattctgccactcagaatctccagaaattcaggaaatggttcaatttacatgtttgtgacacattgttctcatttcatttagttgtgagtttggtcagcaaaagtgctaccatttatgtgtcccaacctgatgaagctaacttgcttcaccagatgttgggagctcctgaattttatcctaagcccctctctctccacttcatgtgaaattcggtttgacctggaattctggtgtgttgatttagccagatttccccatactgagtgtctgattttcctggatatctgatcagtttccttgtccttcaccataacttgggtgacatctgatcaccctgggctaacttcaacaaaaatcctggcaggttgccttaagcaggatttacctcactcctgatgtttcttcttgattttccatcctttgccccaaccctgctgcatgcctataaatccccacgttctcactctgtatttggagttctgctgaatctctccctcattgcaaaatcccactgccctggtccctacacctatcatgagggccctggataaagtcttccttactgtgctgtagaaagtgtctttgtatatacattttttctttaacaaatctgcctttagtatttcctaattgatcaaggaacctcaaacattgaatgaaagtgaggttttccattttactaacatatgtgtatctgtgaatttcaatttcaatgtgtggtgtccagaagtcctgagcaccaacagttgtgcttctctgtccaattatttgattctgaaacctgggagtcatcccaacacaggtaaatatgtgattttttttttttttttggtttttactgtttagtgactgacttatttcacttacactgaagcttcatgaacacaatgatgaaaagtagagagaggacttgtttgaaaatgccagatttatggtagactttaccacccacgtgtgtctggaggtcttcttaaggttccaagaacaggacatttttcccacaacaagacaaggatgagaacctctgagctgtgaggatggaggacaggcagggccatgtgtggacaaggacgggctgctgctatgtccagggtgttctctactagcaaccactccatctccttcctcactctgtggtatttgtcagatgggaaacatgcctagaatttatctttgacatctggatggaagcccaggcaagaggcatttgacagcttattcgtgagcctacttctttaaggaatgccagatcccttgctctccttcctagttcttaacccctttaactcccttcccctcctgcacccatccactgcctatttacagccacgtccccacacccttcactgtagcaccattttcttgggctcctgggaaacacaacagctttggtttaactcacagctcaggcacactcacgggtcctttcagaggctctcaacttccctcctacagtccctcagctcctcctggggtcctaacttggccatctctatcctctctgctgagcctggccatacacaatccatcccatctggatatgtgtatagcagtgggttaactcagcaggcatgaatagttcaaaccctccacgttcctaaaaaggtaaataactaaaaaataaaaacaaaagtaaacctttgttcatttatggctgtctgttacctcctgggatgagatctccgagtccatgaaatcttacacctgataaaagtgtctgcagatgtctgcagccttgggacatgctgtacgagtttaatcacagtgatttatagtgaacgcctgcttttgttttgctggggagggctgtggtctgagtattgtggtcagttacccaggtgttccatagtctatgattcattccccaaacacagccctggacaagaaaactcaggggcactcccctgggtgttgacacttcacacatgtcatcttacctcatagctggagcattacacatgtgcagaaggctccacagtgggaggacccctgagagcttgtgcctggattctcctgagcttcactctttgtgccttttttttccatgtattttcaattgtatcattttgctgtaataaactgttcctgtgaatacgagttttcatgagtcctgtgtttttactgagttttgagcctgagggtggcagatgcaacttctcaatgcagttgtatcagaagaaggatttcctagagagatcctaagtgacacatggctgaagtattgttcagaaaacataagtattcaggtgtggaatggcaaaatctgatacttgggtggcaacagaattacccggtctgagacagcagctgaactgaagtagatgtctggagataaatgcaatttagaaacgataactcatactcccaaagagctggctcaatcgatacataaggaaaaataaaatgataaaaaataacctaaatatgcaattactatttgtgagaacatccgggagagtgattgcagggaaagtggcctgcgccgacctcagattttggccaatgtcatttctggctgatgggctccagggcactacctaagggagcaattatgctgcaatgacagacagaagcttcgcaagctctctccacccagaaggtggttcaggtggtgaagtgcggggactggtgagccacaaaacactgaaatgagggaggaaagtgagaaagtgaaaggcttttgagctttttctttagcttaataatttttgttaattattaacaaaataattggacaatgactaatgtaaaagtggaccgtgttttgagtcccttagaacggaggagaatgcagcggtcaatgttgtgcccagagattactatagaacaatagtaggtggttgaacatgctccaaacacaaagcctcttgttgctgatgggacagctgccctcgtctactgcacaacagcttctccaaagtgtgtttaccctgagcattgagattgcctttctcttgtaagtgaaaaaatcggaaaactccaaataaaggaggagttgtaacgctctatgtgtaagaaattctaatgtggatttatgataactgggatatgcatccacttatctttttatctgtaaaaattcatgggtgaaagtgcaattttgttacatggatatattgttcagtgatgaagtctgggctttgaggagagtcatcatctggatggtgtatattgtacccagcaagtaatttctcatcccacacaccactcccaccatccaaaccttccaagtttccaatatttattatgccacactctatattcatgtgtgcacattatttagttcttacttatatatgacatgtggtattcaactttattcttctgagttatttaacttaagatagcagcctacagtttcatccatgatactgtaaaatacataatttcattttttattattgagtagtaattaaatgtgtgtatatatattcacaaatatatataatgtatttgtgagggtgtgtatgtgtgtatatatgtgcatatatacatatacaacatgttttctttatccaatcattcattaaaaacacttagtttggtaccgcatatgtgctattgtgaataaggcaacagcaaacataaatgcagcatctatcgaatataaaattcatttttctttgagtcgataccaagtagtggatttgccgaattaaatattagttccatttaataagagaacttaccaacatctgtttcttgtttagtttagtttttatttttgactttttaataatagttattctgactggtttaatatggcttctcgttttgacttcaaattgcatttctgtgatgattaatgacattgattgttttttcatatcctggttgatgatttttatggcctcttttgaaaaataaatgtctgatatttgctcactttttaatgtggctatttgtgctttttgtgttgctttagtttcttgtagattccaaatattagctctttgtcagatgtagtgtttaaaaatatttttcgtcattctgtaggttttctgttaactttgttgattatttattttgctgatcagatgttttgcttcttatttgtattaagtccaaataacctattttggtttagttgtgtttacttttaaggtcatagtcatgaattctttgcctagcacaatgttcagaaaaacacttcctaggatttcatttatgactttcagactctcaggcctcccagtcaagtcttttatccatattggtgtaatgtttgtatgtagtgagacatatgggtccagttttattcttctgcaaatagctgttcagtttttcctgcacaatttattgaacaaggtgacattttcccagggtatgctttttgtctggttggtcacagtcagttggctgcaggcacatgactgtatttctggaatgtctattctgttccaagtatctatggttctctggttgattgttacttgtgtataaaaatcctactggcttttgtatgcttttttatcctttattctaaaacttcactgaattaattcatcaattctaggagtacttctaaagaatattagtttttaagtacaaaatcatattgtcagcaaacacacacaaaaaactgacttcttcttttccaatttgggtgcctttatttctttctggtgtcttatttctctggctaggatttcaagttctatattgattaagagtggtgaaagtgggcatccttgacgtgttctgagtcttaggaggaatactttcaacatattgctactcagtataatgttgtatgtgagtttgtcatatatgatttttattaatttgaggtatgttttccttctattctaattttgttgagggttttttatcataaagaaatcctaaatgttatcaaatttttttttctggacctattgacatgattatatgttttttgtttatgtggtggatcacagttattgagacatgaacgttgaactatccttgcatccctgaaatgaaacttagcagattgtagcatattatctttttgatatgtagttggacttgattttcttgtgtcttgttgaggatttttccatctatagtcatcagtgatattgatctgtagtattcatttttgggtccttgcatggatgtggtatcaggctattagtggctttgtagaatgagttagggagaaaaaccctctcctcgtttttttggaaaaagtttcagtagaattactagcagatctttttgtatattggacagaattcaccttttaaaataatatgctttacggctttgatgttgagatttttttaaattactgcttcgatgtcactaatttttgttggtcctttcaggatttttatttcttcctatttcaatcttgggagattatatatttccagacatttatctattcaccctaaattttctagtttatgagcctggagatgttcatagtagactatgttgatcattatatttctatggcatcagttgtaatcttttcttttttgtttctcattctgcttatttaaattgtctgtctactttacttgcctaatctagctagtggtctgtaagttttgtttatcatctcaaaaacccaatgttttattgtattggttctttgtatttcttggttcttaactttatctagttctgctctggtctttgttatttgttttcttctgctgtgtgtttggtttgatgttgtttttctagttatttgatacgtaatgttaggttgttaatttgtgatctttctttttgatgtggtcatttaacattataatcttatcccttagcacagcttttgctgtaaaccagaggttttggtatgctgtttctctatttttattcatttcacaacatgttacaatctttttaaattttatcattgacccaaagttcattcagttgcaggttgttaaattttcattgtgtgtgtagtcttgaatattcttctagggtttgatttctggctttatattactgtggtctgagaagatatttcatttttaaaaagttattgagtcttttatttctggcatagtatataatccatgtttgaaaatattccttgctaatgggaataatgtatattctgcagtcattaggttaaatgttctgttaatgtctgttaggttcatttggtctagagtccaatttaagtctagtgtttctttgttgattttctgtcttaatgttttgcctagtattatcatttgggcattgaaatccatcacaattgtattgttacctgtgttcttccttaggtctaatagtatttgttttatgaacatgggttttctggtgcagagtgcatatatatttagaattgtcatttttaatcaatcattttatcattatataatgactttctttgtctttacttactggtgtttatttaaagtttttttatatgatatagatagtcttgcttgcttttggtttccaattgcatgaaatatattttttcaccctcttgatcttgaatctacgtatttttaccaattaagtgagtttcctgtcagcagcataaatttcaaaactcttttttattctttccactaatctatatattttaggtgaagaatttaactcatttatattcaaacttaatacagatatgtgaggtctggcttctgttgtcatgttaattattaactagtggctttgtagtcttaattgtgtaatagttttatgagtgaattttataattttgtgttgtttatgatggtgagtactgacctattgcttccatgtctaggtctcccttgagcatttcttgtaggtgcggtctggtgtaaataaatgtccttggcattttcttaccttagaaatactttatttctccttcatttatgaagcttagtttagaaggatacaaaattaatttctgacatagaattttttctttttttttctttaagtagtctgaaattgggagtccaatctcttctatcttataactttatgctgagaagtacactgtcagcatgatagaatttcagataaattattagacacttttctattgtgaattttaggatttttttcttcctatttactttagatagtctgaggactatagatcttggtaatgtctgtcttccagtgtcttctcatgtagttttctgaaccacttttatctgcatatgcaaatatctagcaagactagtgatgttttcctcaattacttcatcaaattggtcctctaaaactttttactaattttctccctcaggaatatccatgattattggctaagttgttttacataatcctatacttcccaatgattttgttcatttttttgttattttcatctgactgggttaatgcgaaatatctgtctcttaggtttgatgttctttcttctttttagtgtagcccattgtgaaagttttaaactattttttgtaattaaaattcaatgaagtctttactccctgaagctttatttttaaaatattaaagtcttaagtaaatcttgaattgttctgatttttttttttttttttttgacacggagtctcatactgtcacccaggctggagtgcagtggcgcgatcttggctcactgcaacctctgcctcccgggttcatgcaattctccttccttagcgtcccgagtagctgggactacaggcacacaccatcacacccagctaattttttgtatattgagtagagacagggtttcactatgttggccagactggtctccaactcctgacctcgtgatctccgctccttggcctcccgaagtgctgggattacaggcataagccaccacgcccggcctgagttattctgatttatttgtgttggttctcaaatttcttttggatttaattgagattccttgaggtcaacattttgaattatttatctgacatttcaaatatatcatgttgtgtaaattctatttctggagagttaaggtgatatccggcgtcttgtaattgtgttttttcatacttccacaattgcttacctgcttgcttttcattggctaaactatctcttactgtttttgaattcattttgattttcatgaaaatttcattccctttagaatgtgaatataacgtatattatgtgggtcttttgatttggttcttggtttactcattggcaaaggctctgtaagagtttcttgtatatagatagtcattatttagtggctttctgaaactatggttgtagtaataatctactgggcctgtgagcaggctcactgcctcctgcaggccctaaatagtggaggcctcagaaaccatttcttatttgcaatgcacttgtttcagcacattttatattgggatgttaagttcacctacacattagtatgtgtccttacagatttgagctgactgtggtagaagcagatgagtacatgcttgatatctgtacacagggagaagctctctgttgcctcaggcgatggactggtctatgaagtgcacagtgacttgagttctctgatcagcccctgagtgggggatgaagctggacagagatgagccaccgagcctggcaagcaaaagcgccagccttgatggaaatggcgagctgaggggcatctactcagtgtggtttcttttgttattaagagctttagtgtggtggctttttcaaattcccgttgtagtagtaacatactgagcatgtgagcaggcccgcggtcttttgcggggttggaatcacagaagtattgagaagctaatctcattttcaactgctgtacactggtggtattgagtttgtatgaggtcatgcagtttgaacgtcaggccagtaggtggtgctcgcaggtaagagccggctatggtggcagcagaagggtttatgctttaccggtggttaaagtgggaaatttgtcatgttccagatcttagagaaaagacttttagctatttctcattcattataatgctgcctgaaagtctctcgaacataactttttattatgtcgagatgtgttctttctatacccattttttacattttttttcctgaaaggatgttgagtttcatcaaatgatttttcagcatcaattgaaaaaaactatatgtcgattaaagatctaaatgtaaaatctaaaactataaaaactctggataataacctaggaaatacaatttaggacattagaactggcaaagacattatgaagaaaatgcaattttaacaaaatcaaaaaatggcaaatgagccctaagtaaactaaagagcttctgcatagcaaaagatactatcaacagagcaaacaggcaacctaaagaatggaaaataaaatatttgcaatctatacatctgacagggtctaatatttatagcatacatgcaattaaacaaacatacaagaaaaaaagtgcccaaaggacatgaaaagacacttataaaaagacctacatgtggccaacaagcataggaaaaaatgctgactatcactatcattagagaaatacatattaaaaccacaatgaggtaccatctcacatcagtcagaatggctaatcttaaaaaaataataacagatgctgctaaggttgcaggaaaaagggaacatttatacacttctagtgcaagtataaattagttcaaccattgtggaaagcagtgccatgatccctccaataacctaaaacagaagtttcatttgacccaacaatcctacaactggacatatacctaaaggagtataaacgtataggttcattccagcactattcacaatagcatagacatggaatttacctaaatgcctgtcactggcataatggatagagaaaaatgtgatacatataaccatggaatactatgcagctaagaaaagaatgaaatcatgttctttgtaggaatatgatggaactggtagtcattactcttagaaaactaattcaggaacagaaaaccagatactatatgttctcacttattttttggagataaataatgagaaatattctctcagggcctgagtcttccatattcaaaaaaaaattctaaaataagtgttcaacaagttgccgacatgcctttaaatatcctgtttcatctggaccccttatatcactcaataaagccatgagaactatatttaaaagtgggattctatgataataaataacttaacagtaagaataggaaggatatggatggttttactaatttaatgggtacataactgtggtatacactatattcctatgaataagatattctgatttcagagctaagtattgtttcctacgttgtgtgtgtgacttggttgtgttggatttgagagtgtagcacgtgcacagaccatgtggatcagaaatccacatgtaaagatgacaatctatggatgtgaactacaagtatgtaagtacttcaagtaattctatttaatggagtttgaaataaaactcaaacttattcaaaacactaattacttggtatttattttgagatctatgagtttatcaagaaattcaaattcctatttctatttaaactcccgattcctactctcagtgggagggaaaactcacagccaatcacacatcacaggacaaatctgtaaacgaagagtcattcctctgaaggtcctgggtgttcaggactctcaggcaggtgctgaggaccctgtcttgggagtgcccagcagatctcagaaccctacatggggcctgctggacactcatgtgggataactagtcgccacttattcagagttaccagtgagctttgactgttccgaatgggaccagcatggagtcaaggtgcctgctcaatgtcagagacagcgatggtctcagaaacaatccaggtaatctctaggccaataaaatgtggattcacagtgagaagtacatcctggaggtggagcttgttcttcagtgggaagagtgctgtgcacagaaagcttagaaatggggaagggggtgcgtttcctcaggcaggattagggcttcgtccctcagcgtcccactcttgtatggctgatgtggcatctgtgttttctttctcatactagataaggctttgagctgtgaaataccctgcctcatgaatatgcaaataacctgagctcttctgaggtaaatataggtatattggtgccctgagagcatcactcaacaaccacatctgtcctctagagaaaaccctgtgagcacagctcctcaccatggactggacctggaggatcctcttcttggtggcagcagctacaagtaaggggcttcctagtctcaaagctgaggaacggatcctggttcagtcaaagaggattttattctctcctgtgttctctccacaggtgcccactcccaggtgcagctggtgcagtctggggctgaggtgaagaagcctggggcctcagtgaaggtctcctgcaaggcttctggatacaccttcaccagttatgatatcaactgggtgcgacaggccactggacaagggcttgagtggatgggatggatgaaccctaacagtggtaacacaggctatgcacagaagttccagggcagagtcaccatgaccaggaacacctccataagcacagcctacatggagctgagcagcctgagatctgaggacacggccgtgtattactgtgcgagaggcacagtgtgaaaaaccacatcctcagagagtcagaaaccctaggggagaaggcagctgtgctgggctgaggagatgacaggggttatcaggtttaaggcttttttgaaaatgggttatatatttgagaaaaaaataacaatagaaacaagtacacactctaattttaagagatatattcaattcaagaattgtagaagccgaattcacagtgggaaaggccacactcaataaagttgataaaaacattccaggaaggtgctactgtgaacaagttttcaaattagatgaataaataatttggagcaatgttatttgatcatgaggtgagacagtatgattcttaaaaagtggaaaaaattctttcaaatgtttctgccactctttatcataaaattaattttagagcagttttaggattacaatgaaattgcacagaaggcatgagaattcccatgactccctgccctacacaggcagagcctcctccactatgaccatccagcaccacagtcacaaatcagttacaatggaggaatctccaaggacatttgattctttcttttttggtgatgccctaatataacaagcctaatttatctcggaataccacaagttttgttcagtggatttctaggaatcatattagttagagggaaagttggtgaggctcttactatttgaactcattcttccaaaatccacaaaacatatattaatttaaagcttatcttacttctggtttacaggatccttcccagagagtaagatttttaagattttagaggcaggttcatgtctctaaaaggccagcaagttctggggaatcccataatgaacatcctttcatgggaattggagaccctggcaatgagagactccatgtataatgccctagagttggattagatgcactgtgagctcttgggtggtggttctgaaaaaggtggtctgtgcagtaaatgcaaacacatgcacgggacacaggaaggagcaaaagcttccctttacaaagtgtgtgggcacctggaagaaaccctcacaagggcacgtctcacccttaatgactgcacattagccaggggcatgatcatgattggtcttacaaggaaagagcaccactgaggtcataggttatgaaaatgtcatcctccagctgagaaattccatctgctggcatgtgcgtgtcaaccccgtggagggtgcactctgggagttgacgagatgcatagaaacctcctgtcatgaattatcgtctaccacacagtcagaatcaacctgtgctccagaaagagatacatgcctgtagaaataaacagagcttaaggattttcttacctgctgaatatagtgcccaaaaccacactttcaggaagattagctcagaaatgtttacaaagtgactgaagggcagtggcgggtgaggtgatgggacagcctcagggctgcacttgaggagggctccctctcccatgcaggcttttcctccaggagctgcatcaggaactcacagaggataagggagaattctgagaacatgctactgtggtactgcctagagaggaaggataaatgatgacaaatacatctctgagtaacatatgggcatttgttcatgaaaactgttttttctgaaagcttatgaaggtcttgaaatgcccctgattagctgaggacaaacatttaaaccctccttccacagggagttcaagcaggctggatgtgtcctgctatggatgatcttccccagccccttcctcttcccagctcatccctggctctctgtgtaaaaagttttcatcagtggaaggtggttgatgaagtgaggtcttcaatttcctcatcttctctgtggtcatgttattttcctcatctgaggtttaaaaactcacctgcatgcagcacatgacaggctaaaatctcttgtggacaaaacagtaacaaaggcacccaccatggttgagcacccgtgttgctgacagtgaccaccaagggtcaacgtcctcttcacaatcctgtgtcagagcagcacttgagtgatttcactagcaacttcccaggagaatcggcttaaaactacttgtcgcattttccatacagatataacacatctattttcctgaagaaatagaaagagctgaatgctgaatacactgtatgtctgctggttctgcaagtttgtgactatcactttctaatttctgatctgtgtggaccaccctccagatttttctcactggtgtgaccagccttctggatgtcaaatataattaactttttttcatataaaagtcaacacaagctcctcatggtttcggtgctcactgactactttaaacttacacaatatgtttctttattagttttgttttctggtatctctactcagcatcttcaacacacccatgttaagatgcttgtacaggtaattgttaattttaaatttactggtgtttagtttaattaaataggcaggcaatagcttagaatttagaaacaacaatgtaaaggaaaagtaaatgcaataaaatttaacataagaaaaccagcagctgaaaggaagggaaatctattctgccacctaagagggtatggtgacctcatagtacaacgaacttctgcagtttaatcgatactgctcacaagtgatagcattctctctctttatatcagagcattccctaacatgtacaataaagagtgagcagatacctccaaccagactgaccagtacctctccctgagtgcctcagctgatagagatagacatcacatttgtctaacaaaataattacaggctgtaaggatacccaccagtcatatggagataatttgaaaaacttagtcaaagcccaaaccttataggtagtcatttatacttagaagaattaactcttatcttcacatgtatttttcttaatcatagagaagctactagagtcactgtccaagttactgaatatcttattcctagaatgagacattgcacaatgtgttctgacatgagggaatgtagctatagttaaaggataggagatgtgatcacggaaacacgagtctgcgatccagcagttctttctccctcacatttgcccagaaacaaagaccccagcagaaaaatggaagggttgacttcagtctccaaagtatgatgtgagatatacgtcaggtatttcatgccattgttttatagtaggaaatttaatctctaaagaaggtcattttcaggataatactattctccaggatacttaaatgcccgaaaacagagagcgctacagtgcccagtgtccaggagctacctggcacgggtctggaaaccagtggacagaaatatcagtttctcttaccacatgtatgttggaaatttgaagaatgtttctttccttcttcgtaatcataggctgcaatggactggaggtcccagtacataagaggaaatgtgtctccagtaggaacacaattagtcccataaaataattgtgctcacactgtggtgcccacactgttggaccagctgactgagaaagtgttgtaagagctgcagtgtctactgattcctatcatatttggggctacattcgcagctaccaacggaaagagagagaagtaaaactggcttaggtagagtctatggatttgctttctttccttcaaactgaagtaaaaaaaaaaatcacatcaactaaaatggggacgatgatgaagtgatcaaggacaagagccactcagtgttttaggtgggttttaacctaaagtcccacaacatgtgagaacctgaactctggagtccggggcatctctggggagaatgtggaaggtgggcgggaggaaacagtgattcatgtctagggaaatttcagggctacctgctctgggggaaaggaaagcctgagcctctccgacagtgtcctctgttaaaattgttggctgacttattgtattcttcaacaccaatatttttttagtcctcttttaattttgtttttattattatactttaagttctagggtacatgtgcacaatgtgcaggttagttacatatgtatacatgtgccatgttggtgtgccgcacccattaactcgtcatttaacattaggtatatctcctaatgctatccctcccccctccccccacaccacaacagaccccagtgtgtgatgttccccttcctgtgtccatgtgttctcattgttcaattcccacctatgagtgagaacatgtggtgtttggttttttgtccttgcgatagtttgctgagaatgatggtttccagcttcatccatgtccctacaaaggacatgaactcatcattttttatggctgcataggattccatggtgcatatgtgccacattttcttaatccagtctatcattgttggacgtttggcttggttccaagtctttgctattgtgaatagtgacacaataaacatacatgtgcatgtgcctttatagcagcatgatttataatcctttgggtatatacccagtaatgggatggctgggtcaaatggtatttctagttctagatccctgaggaatcgccacactgtcttccacaatggttgaactaatttacagtcccaccaacagtgtaaaagtgttcctatttctccacatcctctccagcacctgttgtttcctgactttttaatgatcgccactgtaactggtgtgaggtggtatctcattgtggttttgatttgcatttctctgatggccagtgatgatgagcattttttcatgtgtctgttggctgcataaatgtcttcttttgagacgtgtctgttcatatccttcacccactttttgatggggttgtttgttttgttcttgtaaatttgtttgagttcattgtagattctggatattagccctttgtcagatgagtagattgcaaaaattttctcccattctgttggttgcctggtcactctgacgatagtttcttttgctgtgcaaaagctctttcgtttaattagatcccatttgtcaattctggcttttgttgccattgcttttgctgttttagacatgaagtccttgctcatgcctatgtcctgaatggtattgcctaggttttcttctagggtttttatggttttaggtctaacatttaagtctttaatccatcttgaattaattttcgtataaggtgtaaggaagagatccagtttcagctttcctcatatggctagccagtttttccagcaccatttattaaatagggaatcgtttccccatttcttgtttttgtcaggtttgtcaaagatcacatgcttgtagatatgcggcattatttctgagggctctgttctgttccattggtctatatctctgttttggtaccagtaccatgctgttttggttactgtaacctcgtagtatagtttgaagtcaggtagcgtgatgcctccagctttgttcttttggcttaggattgacttgacattgcaggctcttttttggttccatatgaactttaaagtagtttttcccaattctgtgaagaaagtcattggtagcttgatggggatgtcattgaatctataaattaccttgggcagtatggccattttcacaatgttgattcttcctacccatgagcatggaatgttcttccatttgtttgtatcatcttttatttcattgagcagtggtttgtagttctccttgaagaggtccttcacatcccttgtaagttggattcctaggtattttattctctttgaagcaattgtgaatgggagttcactcatgatttggctctctgtctgttattggtgtataagaatgcttgtgattttttcacattgattttgtatcccgagactttgctgaagttgcttatcagcttaaggagattttgggctgagacgatggggttttctagatacacaatcatgtcatctgcaaacagggacaatttgacttcctcttttcctagttgaataccctttatttccttctcctgcctgattgccctggccagaacttccaacactatgttgaataggagtggtgagagagggcatccctgtcttgtttcaattttcaaagggaattcttccagtttttgcccattcaatatgttattggctgtgggtttgtcatagatagctcttattattttgagatatgtcccatcaatacctaatttattgaagagtttttagtatgaagggttgctgaattttgtcaaaggccttttctgcatctatcgagataatcatatggtttttgtcgttggttctgtttatatgctggattatgtttattgatttgcatatgttgaaccagccttgcatcctagggatgaagcccacttgattatggtggataagctttttgatgtgctgctggatttggtttgccagtattctattgaggatttttgcatcgatgttcatcagggatattggtttaaaattctctttttttgttgtgtctctgccaggctttggtatcaggatgatgctggcctcataaaatgagttggggaggattccctctttttctattgattggaatagtttcagaaggaatgctaccagctcctccttgcacctctggtagaatttggctgtgaatccgtctggtcctggacttttttaggcaggaatttccttgtcctaataagcccaggagtgctacaggagaccagggcttatttcatccctcagcggcgaccgtaaaagacagccatcccgaaagcagccatttcagaggcctcccctcagggatgcattctctttctcagggatgttccttgctgagaaaaagaattcagtgatatttctcccatttgcttttgaaagaacagaaatatggctctgttccacctggctcaccagcagtcagagtttagggttatctcccttgttgcctgaacattgctgttattctgttcttttttcaaagtgcccagatttcatattgttcaaacctacatgctctacaaacaatttgtgcagttaacgcaatcatcacagggtcctgaggctacatacgtcctcctcagtttacaaagattatgggattaagagactaaagtaaagacaggcataggaaatcacaagggcattgattggggaagtgataagtgtccatgaaatcttcacaatttatgttcagagattgcagtaaagacaggcataagaaattataaaaggattaatttggggaactaataaatgtccatgaaatcttcacaatttatgttcttctgccatggcttcagccagtccctccgtttggggtccctgacttcccacaacagtttattaactttgtatgactaataatgtaaaatgttccccatatttttagcaatgttttacttatttgtgaaaggtgtgtttattaatttttcattttaaggtgtcacatttatctttcttgtttctgggatttcattctagtagatatagctgaatgcattttaacaattattgtaatcatctcacattttatatttggatttgcatatacattttattaagattttgattttgatataaaatattttcttacaattgtctcttttctatttttatgagataaaattaatgtatgcataattgcatacatcttcaatgtacagtttcagggtttctgacatatgtgcacacatttgtctccagcacctaagttaggatgaggagcaggtcagtctccacaacaagtgtcctcttcagtgcttccagtcagctctcacataaggatttttatttaatttcaagttttcattttcactaatcatcagagaaatgcaaatagaaaaacgttctggtttctgtcactacagttcaattttttcctgttttgggcatcacataaatggaatcaaatgttatagttcattttttgtaaggggctacttttgctatttgtgaggttcattcatgtatttgcatctaccaaggttttgtcatcatatatatacacacacacacttatatatgtactaatgcacatataggtatttcatatctcaatcagtccattacgttaataaatgacagtttattaagtaaatccattcattaagtgaataagtgacaaaaaatatatctattttcctgttgatggaatttagtttccaaaataaatatcgtaaacacatctgttataaatatctttgtacaagttcttctgcttatatctcccatttttattgataaaatatgtataaatataagtatgcattataacttttcagctttatggagctataactgacaaataaaattgtatgaatttaaggtacaccacttgaggtattgatatacatggggaaatattcatcgtgatcaaagtaattggcatgcctatcatctcagagaatatcattttatgcctttaatttattgtgagtctgtgatgaaaacacctaagatctactcttctggaaacagataagtttataatataatattcattagtatagttacattgctgtatgtttcatctccagaactccttcaacctgtgtatcagtccattctcaaactactttagagaactacctgagactgggaaatacatgaagagaagggagttagttcactcacagttctgcaggcttagcaggaacttatagggaggcatcaggaaaattacgatgattgtggaaagtgaaggggaagcaaggaccgtcttcacatgctggcaggggagagagagaaagagcaaggggagatgcgccacacttttaaacctcaagatcttgtgagaactctaacacaagaagagcaaaggggaaagccgcctccatgattcagtcactccccatcagacccctcctacaacacttgaggatgaaaatttgacatgagatttgggtggaaacgctgagccaaacagtatcattatacccggccactcacaaatctcatatccctctcacattgcaaaatataattatcccttctcaacagtctcccagtcttcactcaattcagcattaacacaaacttctacagtccaaagtctcctctgagacaaggtaagtttcttggatgtataaccctgtaaaataaaaaacaagttagttacttccaagctaatatgagatgaatgcactgggtaaatgttcccattctaaatgggagaaattggccactacaaatgggctacaggccccatggctagtccaaacactagcagggcagtcatcaaatcttaaagctccaaaaaaatttccttttactccatgtctcacatccaggacacgttgatataagaggtgatctcccaaggcctttggaagctccacccttgtggctctgcatgttagactccccatagctgctttcataggctggcattgagttgctatgtcttttccaggcacaccatacaagctgctggtggttctaccattctggggtctgaaggacagtggtcctcttctcacagatccactagacagtgcccaagtggggactctgtgtgtggaatccaacaccatattttccttctacactggcctagtagaggtactccattagagctcagcccctgcatgagacttctgcctggatatccaggcattatcatacatcatctgaaatctaggaggaggttcccaaacctcaactcttgcctcatgtgcaccagcaggctcaacaccacgtggaagcaaccaaagcttagggcttgcaccctctggagcaatggcctgagctggaccttgaccccttttagccatggctggcacaggacagacagggatgcaaggcgccatgtcccgaggctgcacagagcagtggcgtcctgggcttggacaaagaaaccatttttctctcctgggcttctggacctgtgatgggaggggctgccacaaagatctctgaaatgccctgcggacattttttcccaccggggtccttgttacttatgcaaatttctgcagccagtttgaatttctccccataaaatgaggttttttgtctaccacatggtcaggctacaatgttttatcaaacttttatgctccgcttcccttttaaacgtaagttccaatttcagaccatctctttatgaatgcacatggcttatgttttcagaaacagccaggtcaactcttcaatgctttggtgcttagaaatttcttctgccagatataccttaaattatgtctctgtagctcaacatttcacagatctctagggtagggggaaaatgccactagtctttttgctaaagcatagcaagtgtgaccttcactccagttcgcaataagttcttcaccttcatctgacaccacctcagactggacttcattgcccatatcactatcagcattttggtaaaacccattcaacgagcctctaggcagtttcaaacttttccacatcttcctgtcttcttgtgagcactccaagcttttccaacctctgcccattacccagttacaaagtcacttccacattttcaggtatcttaatagcagtatcccactcctggtgcaagttttctgtattagtccattttcacattgctataaagactacctcagactgggtaatttatgaagagaagagttttagttaactctcagctctgcccgctaaacgggaagcattattgggaggcatcaggacgaacaatgatggtggaaggtgaacgggaagcaagaaccttcttcacatggtggcaggagagagagagcaagtgagcggggaggtgccacacttttaaaccatcagatctcttgagaactttatcacgagaacagcgaagaggaagacaatcccatgaccaaatcactttatcttaggcccttccttcaacatgcagggtctacaatctggcatgagatttgagtcggaacacggagccaaaccatatcaaccttcataacgggaagtttttaccctttgaccaacaatacccaattttttcctcctcccagcccctgcgacctactattctactctgcttccaagagcttgaatattttatactttagattctatatataaatgagatcatgcagcttttgtctttctgtgtctggcttattccacttagcataatgttttctatttgttgcaaatataagaatttctttgtttttaaaggctgaataatactcagttttatgtaggtataagccacattttatctgttcattcgtagatggacattgactcgttttccttatctagactattatgaataatctcacaatggacatagatttgtcacactcagtttattttctctagatgtatgctcagaagtggggatgctctatgtccagttcactgagtaatcttcatgttgtttttcatactggctgtaataattcacattttgttccaaaccatacatggatacctttgtaccacatattcaggtctttgtgtaactcttgaatccatttttagctgatttctgtgtattgtgtgaggtgagttctatctatttcttctgcatatggatgcccgtttttcacaccactcgttgaagagactgtcctttctctactgtgtgtcttgggaacttgacaaagatcagtttattaggaagaaatgggttggtttccaggttgtgtttaatgttccattggattatatgtctgtttaaatgccagcattataccattttgatttatatagatttgattttgaaattatagattatgatatattcagctttgttatttatgcccaaaattactttggctatttgaagtcttttatatttttatataaattggagctttttaaaaacattttgtaaaatcatgccatggagattatttatttattttattggcatatagtagatatacctattttatgggaacatgtaatatattgatacatttataaatgtgtaaagattagtgtaagatttacatatctgtcacattaaaaatgtaccctttccttgtgctgagcacatttgaatgactcctttcgctattttaatgttgtgcattagattattattaactatagtgaccttactgatctatcaaacatttaggtcttatttctcctctataaatgtatatttgtatacagtaatcaacctctccttatctccttctctcttctatccatccaggattctggtaagcaacagtctattctatcttcaggcgatccagtattttagttttgatgtaaaataagaagatgcaatatttgtctctcttttattggcttatttatcttaacataatgacttccagttccattcatattatagcaaatgacagaatattgggtttcatggctgaataatatcctatcgcatacatagattacatttactctatccatttgtccacctacagacactgaggtgctttcacatctgggctattgtgaaagagctgcaaagaacatgggaggggacatgccttcatgaggtggtggtggttttatcttctttagaacatacccagaagaggatttgccaagtcataaggtatttctgtttttaatttattttggaatcttcatactactttgcacatagtggaaacacaaatggagtaaacattaaaaaagcagtttcggttttgatgtataatccagaaacaaataatgtttgaccatgattctcattaggagtctctaatggatctggtggaaatgcaggaagttttctaaccttgttcaggaaattatgagtttgcacctttttctttttgaggcttgaaattggcatgattcatgatgcatactgttgggaggtttcagaatgatatggcaaaaatcataatgaaaaggcaagacagagagagagggagagagagagagtcaggcctagaaagagaaaaaataattttctcaacaggagaaagtgctggatatctgtatcagtgttgagttttgctcatagacacatctgtaccgagtgaggaaccatgaagtcaagggaggggtctagaacttgttcaagtgaagcatcagcatatttctcacaggcaccaatttccaccacatcacaagggtgatgcatttttgaatgccattaaatatgagttcacagtcagtaatcatgtttccatgaaattcagttaaaataccaagggtgtgtccagatcactcatgcacaaatacacaaaatttgctttttcatgtgtggctatctagagacaaagtgcactgaggagacttcagcaggttacagagatttgcttaagtttggaaaaccatagaagagtgcctttaagtgaaggttggtatataaattaaataggtcaaaatcccctctatggagtagcgttccaattgtgtggaatttttaattccttattcagttgtaaaacataatccctaggactgactccgtggagttttactgctgtgttgacaaaaatatctaacaagcttccttccagtgtttcaagggaagtttttctctaaattttttccaatgtataaattttcctggctaaagatagtaaaaggctgttaaaaacacaactggaatggcagctttaatcttttgctgattgataggagtgagcataatacatgaatctctttgagtgttctgcctcatccaaatacaataggtcaaaggctagtactggaggtaagatttccaaatgtgtttttttccagctaccaagtcataggaaaataacagatacatccttgagacagaggaccataatgccacaatgctggtaggagtacatgtagacaagggagttcaagggtttcttaaaactgataattttaatgtaagaataccattcttttaaacttatgtggaagactgtgggaggttataacaatgccatattttagtatcagccctgcctcacagaatcattttataacagttcctttcatgagtgtgcttcactcggttcatgcaaaaacctggcagatcacaggctaaaaacagaaaatatagaagcttttaatcaactgaaagagctgtagcctttgtcaaggaattattggaagacacagagaacacagatagatgataaataaaatacattcatatcccgttaagtgtggaaattgaggaaagtttacataaatgtgtccaagtggcaaactgtttatttaatctggtaaccaatttttctataaattgtagagttgaaatgcaacaaatacatatttgaaatgatctggcacaaattaagcaaatatggtaactatgtattttcactcatttttatttaagatcagcggctcagcattgatatttttgataatatctgtgactcagcagctttaccttttgaggatatgatctggtatggcagttttcttagcttcaatgttacctctttttgcattgacttccacctttatatctgccaggaatctggggaaaaggagtgcctgtaaacgttccctaacttgcccattttggtgggttttccagaatgtgtgagatgctttttttttttttttcaaagcatcctgaacccatgcactgccctgaaacatgtttatttcctagtttaacaaattggcacttctaataaatgcaatctcttctgccatctgtgctgattttacatcagatagaggactgtgttctaaaggaaatcttatattagtaagagcaattttgtcattaacctagagttttattattgaggtgtgattcataacatataatattaggtagaggttctcagtggcagtgtctaaatctcttgggtgtacagtgtcttccccgttaacatgaagcatttacgagcacagtcatagtttccagccatgcttctccctgtctcacaatcaccacaaactaactatgaccacaactggaacttggtgagttattctttaataagttttaagtttgtctttaatctttatgcctctagattattatgtgagacataatctttatgcctctagattattgtgtaaagctatttcagaagaaagttaaaaagaacattttaactgactaaacaacacaggaaatcattaataaaatgcaaagtgtagatgtgagaggctccaggcctggataatgcaagagttcatgtatgcaggcagtttctttgcccaattatactgatacaaccagcatgtcagcttcatgccccatttgactcctattatgcaagcgcatggaaatgacatgctcaagggtcacacacagatatgaaaactggtgggagcaggagaggagacgactctgcacttctcctctgaaggaccaggaaagcctggacagaccatctccccagcctccatgactgcgcgacgtgcccacatggacactcatctctgacaagataagaagactccattgatgaggctgaacattttatgatttaaattactagagacttacattgaggtttcaataactaatttttataacccaaatttacttacccccatgttgttacctctttcttcagtgaaaaattgcttttgctgtaattgagttttaggaagattcccagtgttcacaactgagcttccaagagagtgttgagaacaaaaactgaatgagggcagagaaacccatctttactgtgttcaccactaaactcaagtggactcggcactgcctttgatcactgttgcttctctgcagagttcaggtttgtatttctcacaattctaacacagactctccctctcctcaaaggtttggcctccactggctgtaaggtcacactgttctgaatttcttgtctgaaccgttttatgagggtggtgatgagccatttaatggaaattttatatcatctcagcatgaatcctatgggcggtcacgaattattattctgattatggtaattgatttttctcagcatattcattactagtgatattcaaaaaccctttttatttaaatctttgatgcttcatttttgttgctatgacactttttcttctactgagtcttcccactagcattataacatgacctaatatccagggctcagttgttatataacaaccacatatgtcaaaagctatgcattcttttcacagcagacataattttctcttttctggagatgaacacacactggctgagctacccccactcacaagaacatatggaaaatcatgacatttttatttacttgactaataaattatgtcattctctcttcaaattctttatcccccagaatgccatgacaaactcttctgcatctgttcaaaccataaactcagaaaccacatggtgagtaaaagctcacttgattcgggatattgggtcaagctcttcccctccaatgtcccacagcattgggacctcagcccacctgtccaggttctatcaagagagtttagctccttcacagtgaaggaaacaattgagttaagagggaacctgcagaagatagacaatattgaaaaccattcatatgacaagggattactatcaagcatataaaataaactcaacccaactgcaaataataatgtggctaataatggaggaataacattaatacatatttctcaaaagaagaaaagaaaaagggcagatagatgatagatagataaatagatatattagtatgtatacatacatatatcgctagaaaacactaatattcaggaaaatgcacattcacaatgagatgtcttttcatcctttatctttgcttgagagtcagaaaatctaaataaataaataaataaaacaggagctggccaggattcatagaaagggaaactcttatagaccattggtggaaatggaaattagtgaagccatcatgggaaaaaatagaactaccatataattcacaatccaactgctgagtatgtatctatttaaatcattaaagtaaaaaactaatattgaagagatacatgtacacccatgtttattgcagcactatccaccatagctaacatatgaaatcaacatatgtgtccatcaacagatgaatggataaataaaatgtgttatatttacacaatggaatattgttcagtcttaaaaatgaaattctgctgttagaagcaacatggatggaactggacaccatcatgttgagtgaaacaagacagacacagaaaaataaatacagcattttctcagtgttatgtggaaattttaaaaagttgatcttctagaagtaaataatagagtagtggttatgagatgccgggaatgggaggagactgagagacaataagaggtttgttaacaaacgtataatttacaggcagataggagggatgtgctccagtgatctacagtgcagtagggtgactgctgttaacaatatagtgcacattttatgtttacaagtagccagaagacagaaatttgtatgttaccaacaaaaagaaatgttagtgtctaagctgatgaatttgttcattgttctgatttaatcataccacatggcacacatgcatagaaatatcacactgtaccccatacagttattatgtgctaactttaaaaaatcctttaattaaaacagattttatttgcatacattacaaatgcttcaacacagagccaggaataaataccatttttctttgaaatgtgaatttcctaacaacgtagttacattcatttgaaccaaaccgtgtatttgatcatggtaagaatagacaggcttatgcatagaatgatatattttaattttagacttctacttaataccataaattcaaataattttaaaacaactaagtaaaaactataaagttgaggaaatgtgtacgtggtgtgtgatgtgtgactttttccttgcgcaccactctgtccatggtggatgtgtggtgtgggtgtctgtgtctatttctgtttactctgcttgaggttctctgtgattctaggatctgtagttcagtgtctttcacaaaactgggaacgttcttagccattatttctttcaaatactgtctctgtatctacaatttctcctttcagatttaaaatgtacatatacaatactttttaatattaatgtttactttcttcactctcttttccttgcactttactctgtaaaatttctagtggtattttaagtgagtggtttcatttaaaaggtgagccagctctactgaagggtgtgcccaaagcttactcaatgtttatactgcattgcttttgatttcttatgcatttccatttgattttttcttagtattttcaactctcagttccctatctagtccttcattatgtatacagtttccttaatagatttttacatatgaattatagttactttatatatcttgtttaattagatagttctaagatccatatcatatagaagtctcattctgatcatttgtttattatgactttggtatttctcattaatatatgtaatctttgttgatagccagatattttaggttggacagttgatattggcttattacttcattttatgcattttctgcctgtatttgaccatactttatttttgccaggcctttaatgtggaaatgtttgaatcttctcagagctacatttgacgtttacttttgcagtagacgtcatagttgaagtctgttcttctgtgtccaccagagacttcagatcctccagtgataccttgtttttctttcctgcttggctttgtctcttcaccctgttccttcctccagagaatctctttcagctccttcaggtggattaagatattatattgaactgacaattgtgaaattggtggaaggcaatagaataaagggagattttctgacctttcatgggtctatatttctacgaaggcattgtgaccctgagtctgggtgtgacattgccggtgtttctgaacttctgccagatgagatgttggtctgtgtgttcttgctgttttccctgctgtggagtcctcttgttttccccagttgttccctcccacagctccaatgttctcttttggtgttatcagcttccagagttgatgacctgacctagagattaaggctctgattaaataagaaggaggggagatacttctcaatggaacttaggtgaagacctctttttccatctcagttcctaagggatggccccagtgcccctaagatcctggctttggtggcttgctcctgcagagtaatttcttagttctgcaatggggattaaggaggtgggtctgaatgcatttcagagtgtgggctctttttctctcccagacagacacattgggacaaaagatttttgtgactgtccccatttttgggaaaaaggtttcaaggtataggaaagctcttcagtatgtggtccctgagaaattcacgctacaacacatttaccacacttgacttcaccaattcagtatgtatgtatttttttctcttataatagcctacatttttatatgccagactctgcctcagttcaactcatacccatgcctttttactctctgcaagaacttgtctctccctaaatttcggatttgatgattatcttaaaacctccagtatttaaagtatattttaaaattggcaaaattccatctcctgtgtttatctgttatgttgatgctgtaaaacagtaagtaaaatatactcctcatctatgtacattttgaagctgagttgcaggttttttggtaagacccagagtcacagagaattcaaatattgttaagctgcttaatagaaaaacaaattatggtaaatgtgttcactggaatactacccatgatttataataaataaatgcctgacacacagaacagcagcaaaaccacacatgctcttattacagaaagtggcttctgaaaaccacaccgggcacgtacagctttgtcctggagttggtttagggggatgtcagagccagtgacgagaagcacagggccagatggcagcgttcactcatcccagacatgagctcctggatgcatacagagcccccccatgtgtgggtttacttccacttctgtaaaaggagaaaatactgactcctacagagcataatttacacattttttaaaaaatgtaatagggtgatcagggcaaagtgtttatcacagcacaatttcataagacagcatattttccaaataccatcattgtcagcaaacttctgcagagcaccgtcttcttatatgggtacagcctattcctccagcatcccactagagcttcttatatagtaggagacatgcaaatagggccctccctctactgatgaaaaccaacccaaccctgaccctgcaggtctcagagaggagccttagccctggactccaaggcctttccacttggtgatcagcactgagcacagaggactcaccatggaattggggctgagctgggttttccttgttgctattttagaaggtgattcatggaaaactaggaagattgagtgtgtgtggatatgagtgtgagaaacagtggatttgtgtggcagtttctgaccttggtgtctctttgtttgcaggtgtccagtgtgaggtgcagctggtggagtctgggggaggcttggtccagcctggggggtccctgagactctcctgtgcagcctctggattcacctttagtagctattggatgagctgggtccgccaggctccagggaaggggctggagtgggtggccaacataaagcaagatggaagtgagaaatactatgtggactctgtgaagggccgattcaccatctccagagacaacgccaagaactcactgtatctgcaaatgaacagcctgagagccgaggacacggctgtgtattactgtgcgagagacacagtgaggggaagtcagtgtgagcccagacacaaacctccctgcaggggtcccttgggaccaccagggggcgacagggcattgagcactgggctgtctccagggcaggtgcaggtgctgctgagggctggcttcctgtcgcggtctggggctgcctcgtcgtcaaatttccccaggaacttctccagatttacaattctgtactgacatttcatgtctctaaatgcaatactttttttgtcctttttgtttctttgtttttttgcaacaggagtacatatcctcagctccacagaagccagggtgtcactttgggggcagaaataatcgtttcgtggtcaacaggatgagagtcctgaggaatcccagggaaacctggagagtgttttccaattagactcagggcagagacctccatgggaatttctgattagaacgggctttgagctctgatgggagccaagagacaggctcacccagggtcggggtccttaaagcctgatggttttcacagctatcccccctcgtcttgtaaactcagactgattcagttgaccctttttctgctaatccattttgcttctctgtaggtttgattctcacagttcgctttcttcttctcttccctgagaacaaacgatgtgttttctgttttcagggaaaatcccagggctcaggtctgcaggacctgggtaggctgaggagactttctcactcaccattgtctggacactcctgttgtcttctgtgcatggaggcatttgggaaatgaagtggacattagtcattaagggaataatactagttttctccaattggatattgatgtagagctgaacttgtgcttctcacactgtcacagagtttggaccctcacctataactttgaggagagttgatgatggatagtccattgtgggtgagctctgggtaacagtaattgtagggtctggctaggcagcctaaggtcaatacttctggacctcaggaaagacaggctggaattcctgggaagacctgcatctgccatccaccgtggagtcccatcatcttctgttatgctgtgattgaatcagccccacctagtttatctagaacactcttcatgacttaggaaaacataatggcaagctctcctaacacctgtatcatgccatgggagcaacacctaagctagtgtgtgattgagtagatgagactgtgatctagtcaagacgacaggtaaaattgattgttgtcattatgatattttatatttggcaatataatcatgctcatattataaatacttttgctacattttttgagtgtgtcagaggctttggaactggaacaacttcatcttgaataggggctaggaaaaataagaccgagacctgctgggctggattcctagtaagttgatgcagtaagttagtcacaggatgagataggaggtctgcacaagatccaggtcataaaggccttgcagataaatcttacagtaaagaagctgggcaaagccctccaaaaccgagacagtggctaaaatgacctcagtttgtcctcactgttcattatactctaattataatgcattaacatgctaaaaaacactcccttccagcccccaagacagtttacagttgtcaaggcaacatcatgaagtttccttgtgtggtttaaaaaggaggggaggaacactcaacttcaggaattgcctggaggactcatgaataatccatccattgtttaacatataatcaagaaataaccataaaatggacaaccagcagcccatactgctgctccacctctggtgtagccagtctcattattttacttgcataagaaacttgttttcattttaatctgtggattttccccaaattgggacccctttctcctaatatttgtgctattattcgtgttctgagcagaaaaccccaagatggaatgaagtttccctacatttttataagaagtacattcacccctttgagcgaaaatgcacagggagtggaatgaggctgggaagctaatggcgtatgatggaagcttgtccctgactggaggagagagggagggaggattgggaggaaggttcctatatttttgtgctatgcaaggaagctgcaaaagataactgagtctcgtgtaagtcagtgctacctctcaggggatccctgtgactccaagaaagggctcttcttaggaatcactgtggagtcagtcctttcattagagtagaccacaggacatgggcctcagcacacgccatgccacagatgtcagaaagcagctgctgggaacctgatccacctgcattttgctgcctgtaggaggagggagggaggtgcattctcagggtcagcacactgtttgtgaatttttatagagaacccctgcttttgctgtatttttattggaaaatatatgaacaagtgtgcacctgcaaacaactgtaattttcacatttccttcagttgcattatttcttaatcctgaatgacgtcctgacacagagttgagtttttcacaggcattgttcgaaggatcgagatgatggcattttccacattcactggtttttctccatgtggcagagaccttgagtagagcacatctggcccttatccacactatctcttgtgtcccctgggaaagagcagagatttgcctgactgcagaatctggggtaggagtctgcacacctctgagcctgcagagaagctcagcgaagttttgtggagtcagagagctttccgtgtggggaacctctagcttcctcactctcggagattaatggtcagctgtacttgaggggttaagaattagagcaccttgggagcctgtctcatcacagttccattatgtaacttaccaccattagactgcgggtaataactcaatcttgatttttctgacccgattttttcatcttattcattactaattttgtttatggaaaatgttatgtttagtttatgattaaaacctcagaactttctgaacttatcaggaataatacaaatgtgtccagtttgggggaaatgtaaatgaatgtccatgcagtttgggtgtgtgtgtgtgcgtgtgtgtgtgcatgtgtgtttgtttgtgtgtgtgtggatatgtcagtcacttacaccacaatgaacatgattgctgaattacatagtcaaactaaaattagatttgctgaaaattgcctgcagcgatgtctgtgaagctgaccctgtcactttgctgtgaagaaactcagtgtacaggcgaggttgcacgggagagctaaaagcttctgcacacaggacaggctgagctcctgaactggagccaggcacaggactgagcacctgagaaacagaacccccagccctcctttatctgggctggatgggcaccagaggacccgcaggagatgctcagaactcacacaagacagagcctcagtgaggagcagaggcagcgaggaaccagtccagggagccctgtgaccgccacctcgggttgtcttattttgcttaacagcatccaaacctcaggagaccatttattacgttatttagacttccatgccctttctgtcccgaagtaaaacaaacataaatatgactctgcagttagctctttgaacctgggttatttttctgagaatgtcatcttcgtcatcaacatcatggtcatcatgtcaaaatcaacaggcaaatccagtcaccgtgaagacagtttcatggcatgattcatacacaatcattccattccacagagaatctctttcagattcttaaggtggattaaagtgttatatttaattgccaattgtgaaattggtggaagacattatactaaaggaattgtctctgacctctcatggggtcatatttccagaaaatcattgtgatcctgagtgtgagctgactttccaagtgttcccaaccctcctccagatgagatgctggtctgtgtgttcttgctgcttcccctggggcagattcctcttgttttccccagttgttccctcccacagctctcataatctctgttggtgtccccaacttccagatctgctgccatgacctgcagattaaagctctgattccgtaagaaagtgaggggagctgcttctcaatagagctttgatgggaacctctgttcatacctcaattcttaaggggctgcaccagtgccctaggatgctgattttcatggcttgctcctgcagggtaatatcttagttttgtagtggggatcagagaactgggtctggatgcatttcagaagtgtgagctcattctctcccagacagatactatgggaaaggaagatgttttgcaggggtaaatgattcaagagattagggcaactctccagtatgaggtcccttagaatttctcactataacatgcctaacacactcgacttcaagcaatccagtgtatatttgttcttcatcttgtaatagcctacattttatatgacagcctctgcctcagggaatttcatactctggcttcattactctctacaggaacttgcctctccctagatttcaaatattttgtttgttttcaaccctcaattatctgaagcattaagtaaaatttgcaaacttccatcttttctgtttatctgttattgttgatactattgttgtaagaatgaatatatgggcccggcgcggtggctcatgcctgtaatcccagcactttgtgaggccgaggtgggtggatcacgaggtcaggagatcaagaccatcttggctaacacggtgaaaccccgtctctactaaaaatacaaaaaattagccaggtgtggtggtgcgcaccagtagtcccagctacttgggaggctgaggcaggagaatggcgtgaacccgggaggtggagcttgtagtgagctgagatcgcgccactgcactccagcctgggtgacagagtgagactctgtctctaaaaataaataaataaataaataaataaataaataaatatgtgtgtatatatatatatatttctcatctatgtacatttttaagcttagcagcatattttttagtgagatccagaataataaaagaatccaaacatttttcagctgcctaatagagaaacaaattctggtaaattttttcactggaatactactcaacatttataataaatatatttctggtacacagaacagcaaggaaaagtatctaagtatttatgctgagtaaaataagccagacaaataagaatatgtactatattactccatttatgtaatttatttcaaatgaaaaaaatctaaagtaatatacaaaagatgagtagttacctgggaaaagggtagaataaaggaaggggaaatgtggaaacatacagaagaacaagagaaaatgttgaggggaactcacttgtccacctcagtaatgatgacgcttacatcatgttttcaattctacactttaaatacgtgaagtgtattatctgccaattaacactcacaaaatttattgcaagcaaacaaatgaaaaattagaccaaaagcggtggtataaagatacaaaatatccattaaaagtcagaaatatatgagaatttgcctcctgaaccctagttctctccttatttttaggtgaatgctagagtgccacaaaaatcactcaagttctcaatacaggaagtgggttccacaaagcacactaggcatgtccaattcttacctggagttggttcagggagtaactggggccactgatgtggagcacaggccaagctaccagggctcattcatctcagacatgagacacacacagcccctcctccgtgtgtgggtttatttcacatctgtaaatggagaaaccattgacttctacagaacataatttacacaaatatgtaaaaatataatagtgcaaaatgtttatcacaacacattttcataataagacagtgtattttccaaataccataattgtcacccaattcctgcggggccctgtcattttatctggggtctgccatctcctcagggttcccaccccagagctctctgtgtagcaggagacacgcaaatagggccctccccatgctgatgaaaaccagctaaaccctgaccctgcagctctggcagaggagcctcagccccgggattcccaggtgtttctgcttggtcaacactgaacatacaggattcaccatggagttggggctgaggtgggttttccttgctgctattttaaaaggtgatttatggagaactagagctattgagtgtgaatggacataagtgagcgaaacagtggatatgtgtggcagtttcttaccaggatgtctctgtgtttgcaggtgtccagtgtgagatgcagctggtagagtctggagcaaacttgacaaagcctgggtgtccctgagactctcctgtgcagcctctggattcaccttcagtagccatagcacgcactgggtcccccaggctccagggaagggtctgcagtgggtcccagttattagtggtagtggtagtaccatgtactacgcagactctgtgaagggccgattcaccatttccagagacaataccaaaaactcactgtatctgcaaatgaacagactgagggcagaggatgcagctgcatatgactctgtgagagatacggtaaggagaagtcagtgtgagcccagacacaaacctcccttcagggtacctgggacaaccagggaaagcctgggacactgtgcactgtgctgaccccaggggcaagtgcaggtgctacaagggctgggtttcctgtcttgatctggggctgccttgttaccaaattacccgagggaacttctctagatttgcaattctgtactaacatttgatgtctgtgactgctaaacttccctcacatatttgttttttgtttgtttgttttgttttgttttttgtaacaggaagacccatcctcacccctacagaagcccgagtgtcaccttgggggcagaaatgaccctgccttggtcacattgatcagtgtcctgaggaagcccagtggaacctggggagtgttttccagtcaggctcagggcagagacctccgtggaaatctctgattagaataggtttgggattcagacttgggccaagagggagtctcacccatgggagggtccttaaatcctgacagtttttacagctgttctccctcctctggcaaaactgtgcacatctgactcagaactgatccagctggcccttacttgctaatcaatttttcttctctctacacttcattctcatagttcccttttcttcccttcccagaaaacagagagtgtgttttctgtggtctaaatctcagggctcaggcctgttacctggaactcaggtgtggcccaggctgtggctcctgtgagacctggggaggctgaggggactttcccactcaccattgcctggacccgcctgctgtcttctgtgcatggaggcatttgggaaatgaagtggacattagtcactgaggggataatggtagctttctcaaatgagatactgatgtagagctgatcttctgtttctcacactgtcacagaatttcctccttcatctgtgactttggggaaagctaaggatggacactctattgtgctgtgagctctgggtgacagcaattggagggtctggctaggcaaatcctacagggtttcaggtcaatggagttggaatttctgggaagacctacactgtcatcctccatggagtcccatcatcatctcttatgctctgatggaatcagccccacctaggttatctaggacaatcttcctgacttaggaaaaaaatgatggcaggctttactaacacttatattataggatcagtacaacacctaggttagtgtgtaactgaataaatgactctatgagtcaaggggacacataaaattgattgttgccatgacatttatttatttatttatttatttatttattggaaaccagagttttattgttactgaaatgagtctcgccaagcattcaagaatgggattttttaaggatagcttggtgggttgggggcagccagtgagtcatgagtactgattgatcaggtcagagataaaatcatagggagctgaaggtgtcttgtgctgagtcagttcctaggagggggccacaagatcggatgagccagtttattgatctgggtgatgccagctgatccatcaagtgcagagtctgtaaaatatctaaagcattgatcttaggctttataatagtcattttatccccaggagcaaactaggaagggttagaatttgtagccaccagctgcatgactcttaaaacataatttctaatattttggctaattcgttagtcccccaaaggcagtctagtccccaggacgaaggagatttgttttgggaaagggcagttattgtctctgttttaaactataaactaaactaagttcctcccaatgttaggtaagcctacacccaggaatgcacaaggacaacctggaggtttgaggcaagatggagcaggttaggtcacagctctttcactgtttcagttgcagctttgcagtggtggcttcaattcctccctttgagttttgaccttatcgacttgttttgtttctctttaagtgatggttttataaccatctatgaaactctaacaggtgctctcacatgcagatttctgattaaaaactctgaagatggttacaatagtatagagataaaactatcaaatagaagactatcttttttgacttttcacttaaaatgttgcccaagaaaacttttcttttgagctatttatagctttcaacaattgagtatagtcctgtacataaaatttggagaatatttgtttctctctgtccactttctccagaatttggaaactctttgtgaatatccttaacttatggcaatatgatttttcataagtgcagtaagattttttttttttttgcaacaggacacaattggagaaactggttattttaccaaggctttgactgtaatggcgtgcttcaccttaagcaatcgaacttgacttatacagccaataagagccccttgggaaaactggcctgtaccttgtccacacagtctttgtacaaggttcctgaccagtggtaagtaaagaatgtcactttctaacaggcccaagaaccccatgttttcctgggaccccagaggaaaaataatttaccagacttacaggtatttgatggtaaaaactcatggctgggcttggctttaaaaaagtcttatctgagattccttatggaacagagttccaccaaagccaattttaaaagcctgtgtaaacaataattatttgtattgtgctttatgcaaataataaggccatgaataataagactaaagtttattttgcaaataaatcagtcctatcttgatttgttttaaataaaaatggggacaagagagaaaaaaattatgctttaaaaatatagtacacctgttgtttgctgttcttgtttttttttcttcagcagtttggacgaaattctaaattatttgtaggctacaaagccataaactaatgcgttcaaatctttacttttaaaactgcgaattgcactccttaccccagttctcattatgtactttatagtatgttgttccctccaatgtggtgctggaattatagatgacagcactgacagctttgccatgcaagccttggaaccccacgcaggcctgcgtgagtacactcagacagttgcaatgaggttccagtcctcttatcttgaggtcagcacctacccctactacgccccaggtcatcaataaaaagttgtaacagtcttggcccttcttacatcttcattatccaacaccatgatttttgttttttgccaaaacaattgccaaatatagtcataatcataggataaataattttgctgaaatatatgtgttattattggtcttttgagatggaaagtccaagactggattatgctttcatgcatttttcataagaagtacttccactcttttgacaggaaacgcacagggggtgacatgtggctgcagaagctgatggcatatggtagaaatctgtccctgagtaaaggagagatggacggaggattgggtgaaacattcttaggtttctgtgctgtgcaaggaaggtgtaaaacatatttgagtctactacaagtcaacattacccaagggggaacccctgtgactccagcaatgactctgcctcagaatcactaaagagtccttcctttcattagagtggaccacaggatctgggccatagcatagacgtcagaaagcagcagcttgacacctgatccatgtgcattttcctgcctttaaagggagggagagaggtgtattctcagggtcaacacactctttgttgatttttacacagaacactggcatttactttatttcattgaaagatatatgaacagatgtgtgtctgcaaatgattgtaattttcacatttattccaattgcataatttttaaattctgcttgatgtcctggcacacagttgtgttttctataggtatttttcaataaatcaagaaaatacattttccactttcactggcttttctccatgtgcagaggccttgagtagatcatgtctgactattagtctgttttcatgctgctgataaagacataccagagacttggaagtttacaatagaaagagttttattggacttacacttccacatgactggaaaggcctcacaatcatggtggaaggtgaaaggcacatctgacatggtggcagacaagagaagagagcttgtgcagggatctccctttttacaatcatcagatctcgtgaaactcatgcagtattacatgaacagtgctggagaaacccgcagccataattcaatgacctaccactgggtccctaccatgacactgggaattatgggagttaaattcaagatgtgatttgagtggggacacagccaaaccatattattttgccccatggcccctcccaaatctcatgtcctcacattgcaaaaccaatcatgcctttcctacagtcccccagagtcaacttgtttcagcgttaactcaaaaatccacagtctaacatctcatctgagacaaggcaagtcccttccacctataaacctgtaaagtcaaaagcaagttacttcctagaaacaatgggggtactggcattggataaacacacccatccaaatgacagaaattgcccaaaacaaaggggccctctgcaagtccaaaatccagcagagcagtcaaatattaaagctccaaaatgatcccctatgactccatttcccaaatccaggtcatgctgatgcaacagatggtttcccttggtcttgggcagctccacccctgtggctttgcagggtacagcctccctcctggctgctttcacaggctggtgttgagtgaatgtgccttttccaggcacatggtgcaagctgtcagtggatctaccacactgggatctggaggatggcggccctcttctcacagctgcactatgcaataccccaatagggactctgtgttggagctctgaccccatatttacctttctcactggcctagcagcggttctccatgagggtcccactgctgcagcaaacttctgcctggacacccaggtgttttcatacatcttctgatacccaggcagaggttctcaaggaccagttcttgacttctgtgtactcactggctctacaccatgtggaagctgccaaggcttggggtttgcaccatctgaagccatggcctgagccctacattggcgtctttcagccatagctggagtggctggacacagggcaccaactccttaggctgcacacagcacgggcaccctgggcctggaccacaaaaccacttttgcctcttaggcctccaggcctgtgatgggaggggctgccgtgaagacttctgacattcacaggagacattttccccattgtcttgaggattaacatttggctcctcattacttatgcaaatttctgcagctggcttgaatttcacctcagaaaataagatttcttttctactgccttgccaggttgtaaattttctgaacttttatgctgtttcccctttaaaactgaatgcctttaatagcactcaagtgggctttttgaattctttgctgcttagaaatttcttctgccagacaccctaaatcatctctctcaagttcaaaattccacaatttgctccagttcccaatgagttcctcatctccatctgagaccacctcaagctagaccttattgttcatataactatcagcatttttggcaaagcaattcaacaagtctctaggaagttacaaactatcccatattttctggtctttttctgagccctgcaaactcttccaatctctgcccgttacccagttaaaaagtcacttccatatttttggttatcttttcagcaatgtctcactctactggtaccaatttactgtattagtctgttatcacgctggtcccaagactggacaattcataaaagaaaggtttattggacttacagttccacatggcttgggaggcctcacaattatggtggaaggtggaaatcaggtctcacatggtggcagactagagaagagtgcacatgaaggaaaactcccctttttaatccatcagatctcatgaaactcattcactatcacacgaatagctcaggagagacccatgcccataattcagtcacctcccatcaggttccttccatgacatgtgggaattgtggaagttacaattcaagatgaaatttgggtggggacacaaacaaaccatatcactgaccttctccgcatcatctctcatgaccccagagaaagagcagagatttgtctggggtaggagctgctcctgtggaacttagaggctgcagacgaccccagtgcagttttatggagtaagagagttttcccatgtctgggaacttctagcatacccactgccagagattgctggttggctgttattgaggggttcagaattagatcacctggtagcctatctcactgcagccccattgtgtaacttaccaccaatggccttcacgtgaggactcaatgttaactgttctgacctcattttcttacctcctttatttgtaagtttggttacagatttttttttactttaatttcagggatatgtgtgctgaatgcgcaggttttagtttcttattcaagccttataattgctcaactgatcaggaataatacaacatgtatgcagttttggggaaatataaatgaacatccatgcaaaattttttgtttggatatgtccgtcagttacacccctatgaacataatagccggtcctcaccagaaattgctggtcctcaccgatctcaaaagcatctagatcttcaacttcctagccttgagaattcagaaaacaatgtttatgatatttctgagccacccatttaatggagttctgttatagcagctgaaacagactaaaccatttaccaagtctcagtaagggcagtgaggatccaccatgcttgagagacaagcattactctctcatttgcagctcaggatgacagaagcatgatcatgagctgatctgaaaagaagatgtggctttctctccctcggatctcagttgaagccatggtgtcacatctctatggtggagactaaattccagtctgtgatgtaatggatgcctgcctcctcccaccctcacttacgagacagagtttccatgccatgcgttattgaccaagaaccaagaaggactccaattattctcacccctgctcacttgtatggcagaggttctggggatattcctgggagaggcataatgagactatttaagtccacgattcccaaacagttttatgctcttaaagcaggagtatcactttgagatatatgaataatttcatgtgcactaaggtggaggctgttatatttttataggtaaagatgcatggcataaagacagagatacagcactctggaaattgtgtgactatgtttgcagttgactgtgaataatttttaccatgaagttatcctaaaacacataatatatttttactgtaagtaattaatgaaaagctgacagctccacaagagcaatatccacttggtttagcagagagaatgagaaatagcataatttaagaataatcagttagacactgtgccatgtgcctgtattttcaactagtgaggatgctaatgtgggaagatcacccaagcccaggatttcaaggccagcctgcaagatattgctagacccattttcttaaaaaaaaaaaaataacattctgggtcatgacaaacctcaaaaactgaccctctaaataggaacaaatttaattgcattaaaatgtggatgaatttttgacacaaaacagtgacagcatgccagcaatgagtacagaataacatccagttgttatgttaagagatacagactccgaaaaagagacatcaggtagaggctgtcaaaggcctcactgcctaatgactgcttttccattgatactgtgtgtatatcccggaatgcacctgtgaatgaggacatcatgtctttcatagtgtgagagaaagagacattactacccatctgacaaaggattgatcagaatataccaggatctcagacaactctataggaaaaatatctagtaatccgaataaaaagcaggcgatatttatttcttaaaataagactttcaaattgcaaacaggcatataaaatgtgctgtgtaacactgatcatcagaacaatgcaaaacaaaactacagtgaaatatcatctcatctgattttaaaatgatttcatccgaaagccagacagaaacaaatgctgggaaggatatggagaaatgagaacactcataacctgttggtgggcacttaagtttataaaaccactatggagaacagtttagagtttcctccaaacctaatagtagtgttgtcatataatccagcaatcctgctgctggcatgtactccctcccacaaaaaaaaaatgttgtttgcactaccatgtttgttatagcactgttcgtaatagccaaaatttgaaagcatcctaactgcccattaacagatgatggataaataaaatgtggtacatatagcatatggattaatattatgccataaagagaatgagattttttcatttgcaacaacgtggatgaaactggagttcattatattaattgaaataatcccagaaccgaaagacaaacttcacatattctcatatatttgtggaagttaaaaattaagacaactgaactcgtggagatagagagtgaaaggatggtcaccagaggctgggaaggtctatggtagatggggattattggggatgctcaatggatgaaaaaagtggttagaaataacaaataatacatagtatttgataacacaacagactaagtataatccttaataacataattatagattgtaaaataactaaaagtgtataaatggaatgttggtaactcaaagaattaatacttgaaaggatgtaggaaccattcatcataatgtgagtattatgcagttcatgctatatcaaagtcaggtaccccataaatatacacatataccatttacccacaaaaattcaaaattaaagtatttatgtatctcatcttctgtatctatattacattaaacctaagaagatactggtttcttcacactaccaagatccacatagacatccgtagcttctttctttgcctgtccataatctgacattgaaaaatgaggaaacctttcctatcatatgacattaatttacttagtgcacaatttcaaaatacacaaattgtgttagaattattaaactgacccttgttgaaaatatgtttatcgactagaataccgtgcttatatgcagcttatttatattttacaatcacaacatcaaattatttccaaagatacttgtttctgatattcatgcccccctttctgcagtgaaattagtacaaacctgtttatcattgttagatatttttatacagctttcattttattctgtgtttcatgaccagctaaatacttttgaagttgtatgcatttaggttaacactttgtctcaaaaaattatgagttttcacaaattatttatgccatgtgtttatcattgaacaccatgaaaatagtttcattgtgattaaaaagtgtgtgtttcacctaatccacacaccttttccccagattcctggaaaaccacaaaggtttactggatctatatttttgtctttggcaaaatagcctggctattctcttagcttcttctgcaaagcatcaagattcaccttcactgactgcagcatttattgggccctgatggctggaggagaggggctggagtgggtggtagccatgagtgacccaagtggaagttctcagtggtgctctgctccagcacaaagaagattcacagttcctggggacaacacttaacatcacaatctcccttaaaattatctactggaaagctgaggagtaggcagtgtattactgtgagagacacagtgagggacatatgggtgagtctagacgcaaacttccctgcaggaagacaagaggggactttgtggtaaatggtgctcagaaccactaggggacactcagaaccactaggagacactcaggatagcagaaggtgctcaggatgccgcagggtgctcaaaacactaggggtgctcaagaccagcagggggcactcaggacaccaggagacacttaggacatcagggggcgctcaggacaccagggggcgctcagcacaagcaggggccacagaatgacaagggtgcattccagaccaccaggaaacactcaggaccaacaagagattctcagaaaccaccaggtgtaacaggaccacctaaaggcccacaagacaaccaggagacactcatggccactgaagaacattgaggacaccaggggttcagggccaacagggagtgctcggggccaccatggggctttcagtaaccacgagggaatcaatcactcaggacaccacggttttcttaggaggcagctccacatcaggtgcctggggaaggtgacgtttgcttttagacctagctgattcctgagctggtcaagcaaaagtcttcccacgatctctcactatttcttccttgtaacccatggtttctttcacatacaaatcattaacttaggataggaattcaattcaacttttaaccttgcatatttttagaataataatagcaatagtaattcaatgtgttttgataataagaaattgtgtatgcctaattcaaactctggttccacgcatgggtttttgtttcttgtgctgtgccagtcacactacagtcaatgcttttctaataataactcaacaatgtcacggtgttaagtttcctttcattttgtctgccatttgtggagatgaaacaccactttcacgggtcagttcctccactttggttgggttctggtcttctgctcttcacactgtttctccaccttcccttctgtcaaatccttttgtcttcctcagtctcctggcaaagaagcaacaaatctatttattttgtctcctccacgtctggtgaatctgttcacttctcttcatgatcattgaacccaaccatgtttagaaggataacagttcaccttacaatatgctcatgtaggtcaggtgcagtggctcactcctgtaatcccagcactttgggaggccaagacgggtggatcatctgaggtcgagtttgagatcagcgtggccaacatggcaaaaccctgtctctactaaaaatagaaaaattagccaggcatggtgtcgggcacctgtaatcccagctactcgggaggctgaggcaggagaatcacttgaacccagggtgagaggctgcagtgagctgagataatgccacttaactccagcctgggcgacagagagaaactccatctcaaaaaaaaaagcatatgttcatctatccgcagactctctgacatcgtcacccttttctagggtcctgcagacatcaccccacaacatccagtccttttcctaagtaccacagagtgggctctgcagctcctgctgctctctgtgtgctcagcgctgaggctcaccagtgctttgatgatgaagttcaaatccctaatgtgtttgcaattctcagacaaccctctagcaagctgccattgtgagtgcattctggggatcctgggctgatttcaggtccatattgctggatgttctctagcatccaggcgtgttggcaaataaacatctagaatttgtattgaaaatttgtggaaaatcaatggtagaaaacaatcctaatttctaaataagaacattttatcctgactttataaaaacacaatgttaatttaaccaataatgtaataaaatgtgtttaaagtgatgtttatcttgttattagatgtattaataattggtattttaaagtatactaacagcataaatgacaaacaaaccaacacagcgattatacataaataccattgtacattaattaatttggcaagaatggcatttattttcatttctaccaaaccttgcctttaaatatgtttgttaattggcattaggatagtgaaacaatcacacagagcaacaacattttggaatattacattatactataaaatagtacattcgattcaattatataattaaaataacattaaataaattcatgttttggtttgatatttggatatgtgttcatttttgtattttctttttttgtatcttttgtagagatggggtttcaccatgttggacaggctggtctcgacttcctgacctcaggtgatttatcgggggaacccacccccaatatttcaatgtagggtctttctattttctgtaagtgtcggctggtctgagaaataaagagaaagagtacaaagaaaggaatgttacagctgggccaccgggggtgacatcacatattgataggtccgtgatgccccctgagccgcaacaccagcaagtttttattagggattttaaaaggagagggggtgtacgaacagggagtaggtcacaaagatcacatgctttaaggggcaaaaagcagggcaaagatcacatattccttccccagggtattaattactaatattccttgctgggaaagaatttagtgatatcttccctacttgcacatcagtttataagctctctgcaagaagaaaaatatggctctattctgcccgaccccgcaggcagtcagaccttatggttatcttcccttgtttcctaaaatcgctgttgttctgttctttttcaaggtgcactgatttcatattgttcaaacacacatgttttacaatcagatttcatattgttcaaacacacatgttttacaatcaatttgtacagttaatgcaatcatcacagggtcctgaggtgacttacatcctcagcttacaaagataacaggattatgagattaaagaaattatgaaagtattgattttgggaactgataaatgtccatattaaaatgaaatcttcacaatttatgtttagagattccagtaaagacaggtgtaagaaattataaaagtattaattttgggaactgataaatgtccatattaaaatgcaatgcctagggccaacaaaggagtcatattaatatgaaaaataatagctgaatattttggaaatgacacatgcagtaacaaatgtctatatgaaattaagaagatattgacacaaaattgagaaaaaattaacataattatgctcactactggtttataaaatgcctataataacactttttaaatcatattatagaaaataaaataactatataaatagcactctctttgcttgattttagtatttggtgcttcaaatgttttttatacaaataaacattggtcattttttgatggtaatttcaatattttcttccagaatacatgttcataaatgtaattgaaattgtataattttcagaaacttattttatcagttgtgacttgtatttttatgatagactttttacatttatatacttttgattcagaataattatagataaaaaaattataaagttaatacagtgtgttcccatctccaagtatctcctaagatgaatatcctctatcatcataagacatggtgttaacacatttacattgataagtgtaaatatattcaataccagaccttattttatttatcatttttccaataatttctattgtaaatgaaaaataaaattctaagcttcctcaagcaactaaatgaactcaaccctcagccaagggaatttcaaagtaaattctaaaacttgttccagcaatgatgggaaagtgagaggtcagacatgcctcattacatgctcctctctttggaattaaggcaccagtggccagcattagtactacaacaaagatcttaagacgggcaaaactatatttttgctgtaaacactttctatagcaaaaagacatcaaattacaacttgattctagtatagcatcacatgacaaatagcaaaacctaatgatttattctgtatgaaatctgctacctggaggcttcatctacataataagaactatgatctccaggaccccttatcttaatccagacactcagttgtaatgattgtattaccttacatttcaaccaattgccaatcagaaaatctttgaattctcctatgtcctggaaccctgtgcataaactttcctgcctttctagactgcataaatggtatagctcacatgtgttgattaatatctgcctgtaacttctgacccactaaagtatataaaatcaagctgtaatcaagccattttggacatgtgttctcaggaattcctggggtcgtgtcatgggccttggtaactcatatatatctcagaatgagccattttaaatatttcatagtttgtcccttttagtggatatcttcttttcttttttttgggacagaatctctctttgctgttgctttcgtatatttgtttgtttccagattccatcaaggccatcagtttgaattcagttgtcttgttcctttattctcttctggtaaatgacagtttgtatttctgaagttttctagttgaatattttatagataaaaatttatcaagtaggttgatagtgccatttgggactcttatatctttacctatttaatcattgcttgttttctcaatcacaatgagtgttgatttctccatgttctatacatgttagtctattttctgttccaaatccatttattaggtcttttaaaatggattttggaaaagttgatcctattattttatgcaatatttcacttgagttgcaaaggtattctttttatgattattttgtctgaaattaacatagctattcaagttttctttggtttatattttcatggtctatatttttccatcttatttcttctctttgtgaatatgttaagaagttttcttggagaaagataattgctgggtcttttttttttttagtcaactatgaggaattattttttaatgatattacccttttgtccaataatggttgttttgtctttttacaataatatgtattgtttctattaatttattatttaattattattgatgaatatcttattggttaccataaggataacaataagacatttctataattgaattctaattcaaaaatgtagtacttctttctctttcttatttctttgagacggagtctcactctgtcgcccaggctggagtgcagtgggacaatctcagatcactgtaagctctgcctcctgggttctcgccattctcctgcctcagcctcccaagtagctgggactacaggcacctgccaccatgcccggataattttttgtatctttagtagagacaggctttcaccgtgttagccaggatggtctctatcttctgacttgtgatctgcctgacctggcctcccaaagtactgggattacaggcatgagccaccgtgcccagcctacccctttatatatagaacagagatattataactatatatgtctaattcctcttttctatcccttttttattttatcagtttgtaattacataagctataaaaatgtaatattgacatttttataattgctttacacatttatgtaataaagaaaacacaaatgcaaaaactaaatttaaacctcatttttttcattgttgacaatctttatcttttggatacattcaggtattggatgtatatcatatggctgctcatctagaaactctgctaaaacgtctatggcaagattaatatgctgggaatagattttctcaggatttgtttgtccgacagagtatttatttgtctttgatttatcatctcaagagacaatgtcaagaagatgctgtttctgcaaatgggcaatctgcaaaccaaggacacgtcactacattactgtgcaagagaagcacatgaggaaaggccggtgtgagacacaaacctccaggaacacctgggctaatgagctgcagggggcgctcaggacccactgatcagtcaaccacagaggggagtgcaaaggttaggactgctttcctgcaagcattgaaaaaagaagaaaaaaactccgtctgacagtttctccaaggaacttctgtaattttagaattctgtgcctaccaatgacatctccaaatatttttttaaaatattgtgtttggaggacatactctcacatggacaaaacacaaattgacacagagatgaaaagccctcaaccatagtcaccaaaattggagacatgtagaagctcactgggacctgttgagtcttctccaatcacactcagaacagagaccttagtgggtctcccttagagtagtcattaaggatggtgataacagcctaaagatggtagaccatggtcagtgtcatatagaatatggggaccctcacaagttttttgtctgacccttctcctgacactaaattatgcaaattaataacactgatctggtgcttcttttgattctaatttattttatttttagttgtcgttctcacttttcctttggattttcctgctccctggaaaaggtaaatgtggtctccgtgacctcaattcaagggctgaagccctttccctgtagctcagctggggctcaggctgtggctactgcagccatgtggaagaggctgaagggactttcttcactctccttgctcaggaccatccactgtattgtgtataggcttctctggaaatgcaagtggccatttgtagtgaaagaaatatgtttgtctggttaaaatgggaggtggatgtagagttaattggctgctacataaactgtccttctccaccagtgcttttaggatgagattgtgaaatttgtaagaatcaaaatggagtcacatatgttaaaaccctgacaaatggattcaggaagtgtagggagaattcttacacacatatccctgacaacaagaactatcataaaatagttcttgcaaaaagaccaacatgacctcataatcatgacttctgcaaagacttctactcagaatctacttgcccagccttagattaatgccatctgaattacactgatcatgttactatcactggtcctcaccacagatgcaacaccctcctgagtcctgaaacctgactccatcccatagagtagggcacagatgaggggaatgcaaatctccaccagctccaccctcctctgggttgaaaaagccgagcacaggtcccagctcagtgactcctgtgccccaccatggacacactttgctccacgctcctgctgctgaccatcccttcatgtgagtgctgtggtcagggactccttcacgggtgaaacatcagttttcttgtttgtgggcttcatcttcttatgctttctccacaggggtcttgtcccagatcaccttgaaggagtctggtcctacgctggtgaaacccacacagaccctcacgctgacctgcaccttctctgggttctcactcagcactagtggagtgggtgtgggctggatccgtcagcccccaggaaaggccctggagtggcttgcactcatttattggaatgatgataagcgctacagcccatctctgaagagcaggctcaccatcaccaaggacacctccaaaaaccaggtggtccttacaatgaccaacatggaccctgtggacacagccacatattactgtgcacacagaccacaaagacacagcccagggcacctcctgtacaaaaacccaggctgcttctcattggtgctccctccccacctctgcagaacaggaaagtgcagctgagatacgttttcctgccagggcctgcatttcccatccccattagactcagagccctgtcttcctccttcttctttaataataaatggcatgactcctgttaatagttcatagaagcagaagctgagtcctgtttgtcaaacattcagcatgaaatgttcatgttacctgggccagatgcatcactggtatgtggccgccagtttaatgggctcatactactccaagcggccgaatacaaaacagcagaacatatgcctttattaaactgcaggaaatgacactggagaaaaatgtggggataagggagcaggaggaattgtgaaaattcagataatagcttttctcgtagagagaaaggtgcgttaataaaataattttataaaacaataaaacagatggaatgtgtccccatcacggagtgtctcacagtaacagtgcagaaataaatttctaaaaatgtcgtagggtaggtgtgatagacaaggcttatttccacacagggagcccataaatacccatgtaattaaaaatccagctcttagaaagggagtgcctcaacttgacatcagaaacccacgtcagtgagtctgaggagcaatgtggaaaagaaatggaaaattcaacaatacctttcttatgaaaatcctagctcacgtttcaacatgaaacataactgtctacaattttaggaaaaccatcccatggcaacaagtcactacactcaaaaggtactgagctaacagagttccagcagtgagcaggtcagtgctgaaatccccggagaatcaaggctctcaggtacgttgtacaaaacccagaactgagccacacaatctatggtcaagtgatctttgacaaagtcaacaaaaatatgcacggggaagaggccacgctcttcatgccatgttgctgggacaattggactgccatatgcagaagaatgaaactggacaccaacctgtcgacatatacataaccataagaaaatggactgaaggcttgattataggacttcaaaatataaatgtactcgaagaaaacaccaggagaactcctctggacattgggcttagtaaataatttaccacaaaaacctcaaaagcacaagcaataacatcaaaaatagatgaatggaatttagttaaactaaagagcttccacacagcaacagagtgaacagacaaattgcagaatgctaaaaaatatttgcacacattgcatctggcaggggactgataggcagaatttacacggaactgaaacaaccccaccacaacaacagctatgaaaaaacaaataacctcattaaaaattggcaaaggacacgagtaggaatttttttaaagaacacatataactggacaagtgctaaacatcactgattatcagggatatgcaaattaaaactgcaaagaggtatcttacaccagtcagaatggctactataaaagaagcaaaaatagcagacatcggtggcgatcaaaggcaaagggaagtctcagtcattgttggtgaggatgtagatgagcacagcctctatggaaaacaatgtggagatttttcaaagaaataaaagcagaactacctttgattcaatgaccccaccattgggtaactacccaaaggaaaaataaatcatcatatcagaatgataaccaaacttttgttttcctgcagaactattcacagtagcatagatatcaacctaaggaattaacctgtgtcttacaacagataattttatttaaaaagtcacatatatatacaattaaatactatccagccatattaaggaatggaatcatgtattttgcagctacatggatggaactctgggtcattattttaagtctaataaacgagaagtagaacagcacacaccacactttttcacttataaatgggagctaagtaatatgtgcacaggcccatagagaaaggaatgatggacattgcagactcagaaacatgggagagcagaagttgggagaatggtgagaaattacttaaagggtatgatgtacattatttggatcatggatacattaaagccaagacgactatgcaatatatatatgtaacaaaattgcagtcactccccgtaaatgtatacgaataaaataaaaaaaaatacaattgaaatgtgaaattattaacagttgatcaacaatcctgaaaattaaaacgtgtgatgcaataaatgaaaataattttagttgaacttcatcaaattttaaaacattttctattcaaccgactatcaagaaactgaaggacaagcttcaggggagaaagtatttgcaaatcatacatctaacaatgtaattataataagaaccctcaaaactcaacagtaaaaagaagcaatctgtttataaaataggcaaaggtttgtgcaaactttctatcaaagaagatgtacagatgacacatcagcatatgaatgtaattttccagtagagaaattcaaatcaagaccaaaaggagacacgactttaggctttagaatgaggaaaaataaagaagaaatactgacagtaccagtgtcagtgagcatgccaggccccgagagactaaaatattgctagtgcaaaatgaaagagtttctgggagaactgtttacagtttcttataaaattaaacatgtccttaatccatgacctagaactctcatccctgagtatgtcctacaaaggattaaaatcatgtgttcacacacacacgtattcagatgtttaacattgtgtgtgtgtgtgtgtggtgtgtgtgtgtgtgtgttagaaactaaaaacaacatgaacatctttgaaaatttgacacaaaccattacaggtgaactccagactttcttctgagtgacagaaggcctgcctgaaagatccccagagacacagtcatggatttcactgtcaccctcacatgtcactggcttgggctgggctctctctggctcttccctgaccaggaccagatgttgagctccactacctgcagttggaagtttatattttcaacaatgcactgagggctaagttgctctacagactgaaccaaacaaacatgggcgcctttgaacaaacagtgcctgacatttgtactgaccccaggagaactcttcccgctctctttcttcttggttctctcctgcaggccagcagccctgcagtttagcctggacctctcatgcatctacccatctcctcccaagtgcattttaccacagcctccactgtttttgtaattctccacactctgttgtaaatgaagtcaggtccttcgagaccagattcgggactctattttatgaccaaatttcagcctcacccccactcctgagacagagctcctaaataagattctgcaggtggagattaagagcgtttttcttcctcaatgtaggagatgagtgctcagtggagggatggggaggagctttccactttaccagcatgcagatcctgctggggtggaccctctgccataggagcagggctgggaaccaggcagccaatgtcctcctccttggtgctgcactcagggcagagcctgcatccatgagtggggctgtgtggaagaagtgagtctctggttctcagtaagtcttgtctagaactgagcctcagcagcatgacctgtgggcaaggtcggagggccaatgtcctggcccctggggaagagtgtgctctgctgggagctgggcagaaggaatcctgtctacttggctgcagccatctgtggtggaatttacatcatgctgagctcgggcatagaaggaaggaagagaatctttgatcaaatatcaatatcatgtctgaccttactgaggttttgtagattatctcgaataaatgttccttcactttctgtatgttgacagggcctttccagacccgttaatttttcaaaattaatctcaccagtttcatggaggcatggatatatcgagctccttataccgtcatgtgagatgtggaactgtttccttcactggttataaaataatgggttgacttttttcccaacactttacagataccatcaattgtcctattgcttatatggttataaccaaagcaatgctgatattattcatttctattctattgcaaggtatgccccctctactcgtctccaattgctggcatgtatttccatttgtctgtatgttttagtaatttgaatatgattcacctaagagtgtttgtgtgtgtgtgggtatgtgtgtgtcgtgtgtgtgtgtgttaagggcttatcctgctatttggtgttctctgacctgcactgatccatgacttacaatttctctaatttggaggaaaaaatagagggaaagtgagtttgagtccagacacaaacctcactgaagtgagcacaggattctaaccccaggggtgctcaggacacgctgatcacaagagccagcctcaggggcaggtgcagatggaggctgagctcttctttcccgtcagcactgtggcttcttctccataaaacatcttcccttgaggaatttatctgaattcatgattttttgcttatctccaaagtctctgaaatgaaaatgtttgttttaataaaagaaaaatcttctcacatgtgtaaaagacagtttcctacagtcgcttaatcttgtctttaaatgtcaattatcaatgcttctgaagtaaatcagctaaatctataaaagacactttgtttaactcaacactgcagcccagcatgacagcactgaaagggccagcaagcagcaggcaggatacggtgcatgccagacactggggcggaaggagttagtatccagtgcaagagaagaaagtgcccgtggtggtcactgtcaggacccaagctcacagctccaattgcaggtgaccccatgcaaaggaagagataccctcaccaatgtttagtgtggatgtcgagtctgatggtgccacattcacacaccacgtgaatatggaaagatttaccaactccattattgaggcgtctgctgagggctgcacaggcctctcaataaagtccaaactggctcaatagagcaggaaagaagctgcctcagggtttttatgatggtttggtgttgaaggaatggtggggcttcctactaaggggaaggagcttgtataatttgaacctaatactggcatccagtgaggacacttccatgattttctactaaatttcccatgtgtgggggacaaaagtgaaggaaaaggattaatcctgtcatcagtaatgaggcatcaaaatagagtctgatgacttattctacttagcaacttaagcaaatgagtgaaaaatgaggtaagtgttcactctgggtggacagcaaataggtctgcagaaaatagagtttttttaagtgtaagcacataacaaaaagaaagagaagaacaaattgaacagggatcttggaccaatgtcctgggtggaagctcttcactctgtgagatcatcagcttgctctgagggtctcgggtcaagtccttcttcaatatatctcaggccttacaggatacatgggaatgctcagcttggtgtccttcactagggaaaagaaagagaaatcagactgtcactgtgtctatatagaaagggaagacataagagactccattttgaaaaagacctgtactttaaacaattgctttgctgagatgttgttaatttgtagctttgccccagccattttgacccagccactttgagccaacctggagctcacaaaaacatgtgttgtataaaatcaaggtttaagggatctagggctgtgcaggacgtgccttgttaacaaaatgtttacaagcagtatacttgataaaggtcatccgcattgtctactctcaataaaccaggggcacagtgcactgtggaaagccgcagggacctctgcccttgaaggcggggtattgtccaaggtttctccccatgtgatagtctgagatatggcctcgtgggatgagaaagacctgaccgtcccccagcctgactcccgtaaagggtctgtgctgaggagggttagtaaaagaggaaagcctcttgcagttgagatagaggaaggccactgtctcctgcctgcccctgggaactgaatgtcttggtataaaacccgattgtacatttgttcaattttgagataggagaaaaaccaccttatggtgggaggcgagacatatttgcagtaatgctgccttgttattctttatgccgctgagatgtttgggcggagagaaacataaatctggcctacgtgcatgtccaggcatagtaccttcccttgaacttaattacgacatagattcttttgctcacatgttttttgctgaccttctccttattatcaccctggtctcctactacattcctttttgctgaaataatgaaaataataatcaataaaaactgagggaactcagagaccagtgctggtgcaggtccttggtatgctgagtgccggttccctgggcccactgttgtttctctatactttgtttctgtgtcttatttcttttctcagtctctcatcccacctgacgaggaatacccacaggtgtggaggggcaggtctccccttcgtacttgagcagccttacaactgggtgggtttatgaattaattcctcggttgcattacatgaaaaatcacacaatctacaaattttaaaaaataagcctttactttttataaaagattacagccatttcacaggctgggaagcacagccattggtgaagacgagagacaggcactcccaaggaggagcggtggggcagaaactttatgctgaacgtgttggctaaacagacataatcaacggattacaggaggggctatgcgtgttcataaaggtggtcatgacacatgaatatgggagcaaacatacacgtcacatgtgacccacttagcagtggggacttagcatttaaatgtgttacagttaggccctaagtgccaaaagctggagcaggggcacaaagaccctcagagcgcagcctccataaatggccagaaccaggccatggtcagtggtctctgatcaggagaaaattcctgaaatcaatctggtgtcccatccaagctggggttatggctgtggaatggggggtcagttagtcaggggatgagctgcagttggttaaatcgtgcttatctcaggatcagtgcttattttgctgctacagaagaaaataacagtttattctttaagagttggggtgagggatgtaacccctgcctggcatggccttaggtcttgtttataacggggcatcttattgccccggagaatctgttctgtcagtcttatgatctccattttaatgttagtgttggtccatgttgtctctgaaccacaaaagggagtgggtataatgaggtgtgtctgatctcttgttctgcccagctgggaactcagtttttaggtgtttttggtgcctccttggccaagagggggaaccactcaatctcatggggtgactgaaattttacttttagtttaaagtttataaatatggacctaagtattgacattctaaaagtcactcctttgttttggctaaaagtacttggcaagagtccttgaaatgaggttcaagagcagtattttctcatgactttatttgcaatagacacatgagagactgttgaaaagatgaagtaccaaagtagccttaatctgttggtgaatggagttggtataatacagaaatcactttcaatattttgtaacacatgcatgcatgcaataagacagcggtgagcactgagtgtaaagtctctaaaggtacgatctttcagccaccaaataatagtgtaataacggacatactctggaggagctgactataataccgtaacaccacggggagaaactttggccaaggaagtccaagattttcttttccttttcctttttttttttttttttttttttttttgttgttgttgtttgagacagagtctcactctgttgcccaggctagagtgcggtggtgcgatctcgactcactgtgacctctgtctccctgattcaagcgattcctgcctcggcctcccaaaagctgatattacaggcatgtgccaccacacccagctaagtttttcatatttttagtagagacggggttttgccatgctggccaggatgatctcgcactcctgacctcaagtggtcctcctgccttggcctcccgaagtgctggtattacagcgtgagccaccacacccagccgagattttcttaaagttttgaaaattttaatttaagggttacaattttttcaacatttccagaaagctgtagacagtattattctgtgttatatgagtgattgtagttccttccatttttagatagtattacaaacaattttagggctgcttgctttaaatagatagatgatagatggctacatacatacatacatacgtacctcgatagagatatagttgcaaacataaatacatagatagatagagttacagatgtattttagttattatgctacttttttctttgccttttcttcctatgttatgttagtcaggtctccaggacttaggagtgcatttacaatcccttcccttgtccattttgacgtgttctagacaatgcgagaatcctttgtgtgtggatcacttccaagtcatgcactacccttgcaataaatgtgtttgtgtatgtctttgccttactgacaagctctgctgagtgcagttatttctgccgtctgagctaactttacacttggtagagaaatatattctagatggaggcttccactattaatttaaattactaattcataacctccagcttaattattgaggtataatctatcagagatggtattagaacaaaggtttccaatgaaatctaacagaagggatgtcaaaaaattttcctaacttaggtaaaataaccctgagcccattcttagtatccagccatgtctcctatctatcacactgaatcccacactaactttgacctgacttgggacttgtaagcttcaaatatgaccttttgattgcaatgcctctaattcaggacgtgtggttattttagccaagagtaaagaaaaccaaatttaactcgctaaaaatgacaaagattaaaacctaatgaaatggaaactgggatatgagtggctccagacttggctattttaagagtctatgtgcccaggtgatttcttttctccattttacacacaggcaaacccaaaacgtcagcttcatctcccgttgactctcatcatctcgttcttcatcagcttgcttagaatgttgacttccagctgcatccatgttgccacaaaagacatgattttattctttttctgtgaatgcatagtgttccattgtatacatgtaccatattttcttgatcaaattcaccatgaatggacacataggttggatttatgtcttaggtattaagagtagcatagcaatgaacatgtaagtgggtgtattttttggtagactgatttattttcttttgtgcatatacccacatatgagatggccgggccaagtggcagctctgcttcaaatacttttcaaatctccagactgctttccacagtgcttggactaattcacattccacccaacactgtacaagtgtttcctgttctccgcagcctctctccagactgctttccaagattcctctcctccactttgacactttggtatatccatgtgtgtcctctctggttcagccagggacagagaaccaggaagacatcatgcattttctagagggagctggcttggggaatcaacgaccggagtagaaagtgcctttgtccatgcatcacaggcctgagggccctgggcaggaggtcaggaagagaggatgaccagacagctggggaaaccgggatgaataaagccagtttccttcctggtgaggaggggcaggtcgaagcctcgtgtccctgtagggatgaagcacactcacctgccactgctacctgccaatcaggtgacctgcagagcagcagctcctgagtcactgatggtgacttcctcctcctccaaaccctctaggatctgtgcttctcagagtgggaaccccagcaggtccccaagttttcaatggattcacctagctagtgtctctcctcagccccatccccaggctcctgccctggtgctgtgtacagtgtcacaacaggggtgacagtaacagctggtgcctgcactttccaggccaagaagtttgaaagaagcaagtcacagggccagccgggatatggggtaatcacacaaatttccttcttggaggaagtgctgggaaacatccttgagtcctcctcagctcacgtgcagctgctgctgttcatcccagtgcgggggacacatgagccctccccatgcccaggatggagctgtttcaatcacagcaggatgggaatgtgtcttctctatgggggcttttgaagcacagctctcctgttcctgagatttgagatttataaagacaagtcccacagagtggacctgcacaaataagacagtacaggatccccaggagagacatcccataagagaagggacaggcgggtcccatcacagacactcatcctcagaaaccctgaccggctactcaccttcacaggtccccagttcctgatcagtgcctgtgtctgctcctgagaagagatgaaaactcaagacaaatacttctcatgatcataggcttaaaaattctcaacgtaggaaatcaaatccagtagtttatcaaaaagttaacacactgcaatcaagtaggctacattctgcaaaagcaaggctgctttaactgctttccacagtgcttggactaattcacattccatccagcactgtacaagtgctttaacctatgcaaagcaataaatgtgatgctctactaaacagaatcaaaagcaaaaaccatgtgagtattccagcagatgcaggaaaaaagctttcaatagaatctaacaacgcttcatgataaaaaccctcaaaattatagacattgaaggagcacacctcaatctgatgagccgtctatgacaaacccatggccaacatcatactgaatgggcaaacactggaagcattttccttaagaacagaaacaagaaaaggatgcccgctctcaccacttctattcagcctagtactggaagtattcaccagatcaggcaagagaaagaaataaaaggcatccaaataaaagaaaaagaagaatgcaaaccctctgttttcactgataatatgattctatatgtagaaaatattgaaggctctgccaaaagtctcctagtattgatacattcgtttaggaatgtttcaggatataaaatcaatgtacgaaaatcacagtaacatttctagtcaccaacaacgttctggctgagagtggaatcaagaacatgctctcccaatagccaccaagacagtggaatacctaggaatagagttaagccaatgagatgaaatatctctaccagaaaaacagcaaaacacatgtgaaaaaaatcagagataaaacaaataaatggaaaaataaacattccatgcttatgaatttaaacaataaatatatgaaaaagttttaaaatttgtgattaattctacgtagcaatgccatttttttcaacatttacagaatattgttgctggtaatagcagtttagcatttgagtaatggaaacaccttacagaatcactttataacagttgcttcctgtagtgggttgcttcagttacctgatgaaaacatctgcatgtcacaggttgaaaacataaaatatgtctatcaactgagaaggttgtaggcttttgtcaaggaattacttcaagtcattcagaaaaacagcagacagtaaacgaaacttgttcaaattccatggagagtcaaagctgaagaaaatccaactagaagtgtccaaaggcccccaaggctcagttcctcggcaagtcccaccttctcaggttttccagaattttgtttttaactgatttacactgagtgaagtagattaccaggagttttccattattttaacataaaatcgggggctaagtgttgttattttataaagacatctttgaatctctcaggaaatttacctcctgagggttcagataagatcctactctaggttaagattacatgtttggcgcaatgaactggtacaaatcttactttagctttcatgttatctatttttccgcactgacttccacctttttattagtcaagtatatgggatggaagagtgcttctaagaggtccttaacttgcccatttcaatggattttcaagaagacatgagaaaccactttgtttgcaaagcatcccaaagccatgtcctgctccagaaacgtgatctcatttcctggtcgtttcttaactgacacgctctaatcagtgcatctgggccaatttgaaatgaggtgaagaaatgtgtcctaaagtaaagctaacattgtaataggaattcgtgtttaaaaacatttagttttattattgggcaggatccatcaacatataacagttgaagtttctcaacaggagtttaataaatataaggaatgtacagaagtgtttcctaatttaaataaaatgtagtgattacctaggctgtgagtgcaatcttggtaatcttctatgtccatgcccatcactctgtgcaccgcaaactaattttgacctcagcagaaacgggattaattttcaaattagtaatttttttccaatttaatttatttagatgattatgaatgactattttagcagaaagagaatcaaggaaacttgaactaaataaccagaatttaaaatgacaaacaattcaacaagatgccaggatgtgagtggctccaggcccaattaattcaaaactttatgtgcccaggttctgtattttcccaaaattacacatctccattccagcttcatgccacagttgactcccaccgtgtaagacatggcgacaccattcccaaaggtcgtgtgcaattctgaaaatggaataagcaaggagaggagatgatagtttatattctcctctgaggaggaagaattgcctcaacagaccacttctcctgcatctgtgactagaactatgtcacaggcacacatggagcaaaatccctcaaggggataatacggtaacattaatcagggtgatcatttttaatactataaaattcatagatgacactgcattccagcctgagggacagagcaagaccctgtctctaagaaaaaaagaacaaatcaatagatactgataccaacattttagataatgaaattttcataatgtaattttaaatacactcacatcattacataaatcttcccagaaatattcctagtcatgttgagtttcatcaacttttccagtgttcaaatctagaaatccaatagactcttgaggataaatcaaaatgagggcagtgaaactggtatctgctcagcacctgttaactcaggaggactcaatacacccttgcacactgctgcttctctgaatggctcacaaggactccagctcactctccatcctcctcaaacatctggcccccacttgccctaagttgactctctgctcttagtctgtgctctgaagtcttcccagaggtgaaagtgagctgtcagatggaacttccctctcacctcagcgtggaatttactgctacatttaactatcactctttccataatggttgatttcttggtctgttcattacagatcaaaggcatctgatttgaatctttatttctttgcatttgtctccatgacaattttgggaggttttaccgccagcactatgacacgatgtagtaacatgacacatttgtggttaacaacacctacaaattcagaagctcttcggttgtcttcccagcaaatatagctgcttcttttctgtgtatgaacacatcctggaaacacgtacacacccacatagatatatacatgcctatgacattttcttctctgtaagtgaaaattaacctcaatttcatacgaagttcatcatttccctgaaggtgaaggtaggtcgtttttcatctgttctaacaaatgctcagacaccagctagtaagtgaggagctaccctgcttctggatgttggatctgtctcttcccctttgctttaccacagaagattggccacttgtccaggtcccaagaagagagtccaggtttgtcctgataatatgactcatccaacttctgataactctactgttacacacattcatggaggtagcctattaattacataattcactaaacaaataccaaatacccacattgcaataccccatacccaagggtatgttcatgcattcagtgaaggaaaaggcttttcagagacagatagatcaggctagattggtcaatatatgggtgaaaacactggacttgaatgtatctgttttcccccatgtcacatgtgagacctgtcagacaggaccagggttccttgtgcactcagaggtgagggctcacagaattcctctctggtttccaggaaaggtaactgcagtaatcttggtaatgagaatatcctccagtgctgacctattatagagtttacatatgaaattttcactgcaattcacaatctactctttcacacagaagtgtacagaggtcaggacacatcctcagggtcacacattgagaatgatgaagatatgtcccacgagtttttcctaaggtctcagaaagaattccaggactcaaaaggtctcagagggcagctcccagtgccttagttaaaatggtggctcaggcctgtaatcccagcattttgggaggccaaggcaggtggatcacctgaggtcgggacattgagactagcttggccaacatggtgaaaccttatctctactaaaaatataaaaattagacggggggggttgtgcatgcctgtactcccagctactcgggaggctgaggcaggagaatcacttgaacccaggaggcggaggttgcggtgagccgagatcaggacactgcactctagcctgggcaaaggagcaaaagttcatctaaaaaatttattttaatttaaaaatttttaaaaaatggcccactccctagaacagagagattccctctaaacatgatggaggtcccgaactatacattaagtgaatcctggtgtgtctgaactcacatgattattacgttaagctgctgttccaatctacttcctcacctgggaaaagaggagccagggcatggctagttgaggccccaggaagagaactgagttctcaaagggcaaagcaagcatcctcatcccagggtgagcctaaaagactggggcctccctcatcccttttcacctctttatacaaaggcaccacctacatgcaaatcctcactcaggcacccacaggaaaccaccacacatttccttaaattcagggtccagctcacatgggaaatactttctgagactcatggacctcctgcacaagaacatgaaacacctgtggttcttcctcctgctggtggcagctcccagatgtgagtgtctcaaggctgcagacatggggatatgggaggtgcctctgatcccagggctcactgtgggtctctctgttcacaggggtcctgtcccaggtgcagctgcaggagtcgggcccaggactggtgaagccttcggagaccctgtccctcacctgcactgtctctggtggctccatcagtagttactactggagctggatccggcagcccgccgggaagggactggagtggattgggcgtatctataccagtgggagcaccaactacaacccctccctcaagagtcgagtcaccatgtcagtagacacgtccaagaaccagttctccctgaagctgagctctgtgaccgccgcggacacggccgtgtattactgtgcgagagacacagtgaggggaggtgagtgtgagcccagacacaaacctccctgcagggaggcggaggggaccggcgcaggtgctgctcaagaccagcagggggcgcgcggggcccacagagcaagaggccgggtcaggagcaggtgcagggagggcggggcttcctcatcagctcagtgctctccctcctcgccaggacctcagctgtccccaggcctcctctttctttattatctgtggttctgcttcctcacatcctcgctgcaggcaagaaagaagggagaaatttctctgtttaccattaaggttttaacagtcactggcacctttttttcaacaaattcccacaaggcccattttaccttcttgacaaagtatttcaaggcttctcaccatctcttgattggcgtcatcggctgcatcgtgtcctgctcttaaattcatgtgatgaaaccccaatcccagtggctctgtatttggagagagggattttaagaaggcaaataagttaactgtggccataaatgtgggaccctaatccactaggactcttgtccttatgggaagtggaagacatcagaggcctctctctccacatgcacacagaggagaggccatgtggggacgcgctgcatgagaaggtggccctttgcaagcctggaagtggcctctcaaaaaactaaccctttcttcacccagatcttggacgtcaaggctccagaacaataagaaaattaatatttgttatttgaaacaacctagtctgtggtatcttctgatggaaagccaagcagattcacagatacaattgtgttagctccgtctcctggagggagaagcagcccaccgaggctgacacatctctcagattatttttataaagaaaaatagatccaagatgaaaaccccaccacatttctgctgagtcattcacttagcaggcttctctgagatcagccctggggggctgtgttctaggtcatgtctctcactttccactatgagaatccatgtagatcatgagaaccagccagatggagtcctgatcccggcccaccttctgctgctccccaagtatcccaaagaaaaccactccagcgtcacccctgtgtcttctactctctaaaatcccactaaagctgaccttaaaccaggagatatttggggccgggctcttgttctcttcttcttagtcttccataaggtccaggtgctgagtaaagcctcagtaaagattgagcttcagttcccctaacccacatcattcccttacatccttgtcatgcatctgtcctctgtgggcactcagggcaggttacacaggaattgcctgaagctggcctcaactgatgtgctgagaccacgggtcatgcacatgtatgattccgggtcatgcacatgtatgattccaggtcatgcaggctctactgcaggacagacctgtgtcctgtggggcacagacagctgctgaccccgggtctcctctaataactcacacacctggtgtttgtgtgtgtccagatggccccatgagcacagcacactagggtggccaaccttacaggtggggccgtcagatggaatggacaggctggtcactcccatcatcagtgatttcccagtgaattttaaataaattaaacaaaattaacaacaaaggggaaggatatgtacctgtctctgggaggtatacagggtcccagaactgtgctgggagtgggtgtgaaacgcccttttgtgtggaaagccctccagcatgagtgaaagctgaaggaatgatcactgtgcaggtggaggatgataggcagctggcagggtacatttcctgaagctgttcctgggtgcatgatggttggatggcccatggtgttgagggctggactcacataggaacaaggaaattatcccatgggaatggcagaaaagaaaatggagatggacacccctggagacagcttattagatttggtggaggaaaaatagaaatttattccaatgaccccagcattttcagctaaataagagttgcattaatagacagaattatgaaaggaagggagaaggagtttatggagggaaaaaaaaagaagataaattaaaatttaaaactatgcaaatctatcaattggcagataacagagtggagctgatgcagctacttccttgttctggaaacctgccagagacacttagcattcctgtaaggccagtctagtggtgatgaacttgtccactttttacttttttggggaacttctcaaacctcctgcattattgaagaaaagctttaatccatgtaacgtatttatttggaagtttcttggctttgtttttattttcagcaacttgaacagaatcatgcacatcatgatatttcggtgaacaacaggccacctacaggacaaaggtctcattagattataatactgtattttcaccgcatttttccatgcttagatatgttcatctgtataaacatctaccatggtgattcagctgcccacagtattcactacacttacatgacatacagatttgttacctaggagcactatgctatcccacgcagcctgggtgtagcaaggtatttcatgtaggtttgtgtaaacacactctatgatccttgcacaatgacaaattgcctaaggacacattgttcagatgtattcctactgtttttcatttttttttagatggagtctcactctgtcacccaggctggagtgcagtggcacaatcttggctcactgcaacctccgcctcccaggctcaagcgattctcctgcctcagccttccgagtagctgggattacaggcatgaaccaccacgcccagctaattctttttttctattttttagtagagatgggatttcaccatgttgccctggctggtcttgagctcgtgacctacatgatccacccactttgccctcccaaagtgctgggattacaagcgtgagccactgcgcctggccaatgtatccctactgttaagccacaaatcatcgtatctcatttctctcccttttttgtccctgttaatattttcatgttgtgcgtgcattcttctcctagctcagtgaacatatttataaggtttactttgaattttctgctaggtaatcaatgtatctccttttaatttgtgtcagtttctagtgctttttttgttaaataatttggaccacttttttctgttttgtgattattgttattattattattttttactttctctgttgctttctcctcattagaagaaaaagctaccgtaatcactcttcacagaatatgcccagggaaaatgccatcacctatcaacccaggctgtcattgtggcatctcttaaaacttcataatggttgaaattttttgttgttgttgttattagtggcactcagacctacagaggattttaagttttgctcctactctaaattaggtggcattgaaattcatcctgcaggcagtctctgataaagtggaggaattgggcagttttgttatgcatatggttcataaaaataatatgagtttaaggttttctcagccaagtgctatatcctgatattttataatcacttctttgaatctctcttgggtttatcttttgaaaatttagatcagaatataaaccaggtttgaggctttttgtttggtgtaaacatctcctataggtcattgcgtgaaaaggcacagagtctatctgaggaggagaactcagggaagcctcacaacaacaggggagacaaaaccgaggtcactaaaaaaatatgaagcttctggctcctgcagcctccagacatgccccacaccctctcattgcacagaaatgaattcctttctctttcctgagtgatctttgccaagattcctctcctccactttgacactttggtatatccatgtgtgtccattctggttcagccagggacacagaaccaggaagacatcgtggcttttctagagggagctggcttggggaatcaatggttggagtagaaagtgtctttgtccatgtgtcacagccctgagggacacgggaagaaggtcaggaagacaggatgaccagacggctggagcaaccagtatgaacaaagccactttctttcctggtgaagaggggcatttggaagcctggtgtccctgtaggggatgaaccacactcacctgcccactgttacttgccaacgaggtgacccgcagagcagcagatcctgagtcaccgacagtggctgcttcctcctccaaaccctccaagatctgtccttccaggagtgtgaacctcagcagatccgcacgttttcaatgggtccacttagctagtgtctgtcctcagccccatccctgggatcctgtcctggtgctgtgtacactgtcacaatagtggtgacagtgacagctggtgcctgcactttccaggccaagaagtttgaaagaagcaagtcacagggccagcctggatttggggcaaacacacaaatttcactctgtggggaagtgctgggaagcagccttgagtcctcctcagctcacgtgtggctgctgctgctcatcccaggtgggacacatgagccctccccatgcccaggatggagctgtttcagtcacagcaggatgggaatgtgtcttctctatgggggcttttgaagcacagctctcctgttcctgagatttgagatttataaagacaagtcccacagagtgaacctgcacaaataagacagtgcaggatccccaggagagacatcccatatgagaagggacaggcaggtcccatcactgacgctggtcctcagaaaccctgaccagctactgaccttcccaggtcccctgttcctggaacagttcgtgtgtctgctcctgaaaagatgcccatcaagagtccccagggttctgcccccttccttgatgtgcctctgggagtggggctggctgggctgtgggtctggcgtgaccctctccacaggtcagcggctcagtgcaggctgcaccgactcggtggggctgggctgtggctgaccctcccagggggagcctggactcttcttaggggtatctgcaggatcccaggttctgggagaacagggaagccacagtgtgtgcagggccccatctccagtaaagtgtttgctgtcgctctgttgacaagggcatatccccaggcctaggggcactgtgggcgcacgaccaatgcgcgagacacagggagtaaggcacagttccctcccattactgtgaggacactagacacagtgtgtgtgtgtgtgtgtgtgtgtgtgtgtgtgtgtgtgtgtgtgtgtccattactgtggggactctaaccaccgtgtgtgtgtgtgtgtgtgtgtgtgtgtgtgtgtgtgtattaggagttttgcagtggcctctgagacccatgatcttgcaggtttagaaattatctgatgagatgttcatccacaggaaccgacaagagattaggtgttctcccaaagcccctggaagctcctggactcactgtgagtgtggactgatccagtgcttccagagctccacagaaggggctccctggtggtttcatagaatccttgcttggggtgtttctgcagagttcactggctttcctacgaccaatttaccattgcaagcgatggcgtcagcagcacatggtgtcacgtgtcactaaaggagcattctgagccaggacacagccacttcatactggggggaaaatgctctgggagcccagacaggagcctctctgcagtgcaagggctgggctgcagggggcgctcaaggcccacccagcacaggctccagccccagagcaggtgcacaggaggctgcggatggagtccccttaagatctgtgtcattcttctaaaaaaatctaaaataagtatttgacaaaaactgctgaagagtccataaatatcctattcaactgcaagaatttatcaatttacactggagatttctaaccctgctacatatcttaatagtaagcatctggaggtcaattaagcttttattttatataaataagtgcaacttttggagaaacacactcatcccccaaataacacattcatgtattaaagcctagaaatattttaaattacctctgagctattcaagtgtgggttcccagtgaagtcctgttctagggaaaattgttctccagtgggagaagctctgtcaacatacagtttagggatatggcagggcacacatggcctctaaggggattatagcttgaacccttagcatcctcctgttgggtaatccatgtgtcatctctccactctttctcatgctgtgttaggtatgaaatagcatcgctcatgaatatgcaaataactgagatgactatagatatctttgtgccctgagagcatcacccaacaaccacatccctcctcagaagcccccagagcacaactcctcaccatggactggacctggaggatcctctttttggtggcagcagccacaggtaaggggctgccaaatcccagtgaggaggaagggatcgaagccagtcaagggggcttccatccactcctgtgtcttctctacaggtgtccactcccaggttcagctggtgcagtctggggctgaggtgaagaagcctggggcctcagtgaaggtttcctgcaaggcttctggatacaccttcactagctatgctatgcattgggtgcgccaggcccccggacaaaggcttgagtggatgggatggagcaacgctggcaatggtaacacaaaatattcacaggagttccagggcagagtcaccattaccagggacacatccgcgagcacagcctacatggagctgagcagcctgagatctgaggacatggctgtgtattactgtgcgagagacacagtgtgaaaacccacatcctgagagtgtcagaaaccccaggggggaagcagctgtgctggcatggaggaaatgacaaagattattagattgaagactttctcagaaaatgatattaagtcattaaggaaaaggaacaatataaacgtgtatttgagaaattttaattatttgagagatttttcatacaatatttattctgcaagcaaatttcagggattgaattaataaaactgatacagaacttcctctgtaggtatctgtgtaaacatcaatttctgaatcagtgttgtaaatattttggaacacacacacaaatcacattttatctctacttttatctctatttttaaaaatgccaaaaaaactcattttgtgcatgtagcattttgaattcccaccatcaatgcatgatagttcttggttttccacattcatattgccatttatcattatgagaattgtgtgttttaaccattctaataggtgagtaatggtatctaatttttagttaaatgcacatttccctaataaaaattcacatttaacaattttcatataatttttgccaagatgcctcttctcatatttggttcatttttaactgcattgttttcttttgattagttgtaagtttacttgcatattgattataaaatcatttaacaaattaaaagaattcatttaacaaatatgtgacttggaagtattttctccaagtctgcggctgtcttttactcccttatcagtatgtattgcagaaaagtgtgtgtgtgtgtgtgtgtgtgtgtttatacaaatttagatttaaaaaatgtaaaatgttattcatccacagatcatgtctttggtattatatctgaaatctcattataaaatacagtaatagcaattactttttccacgtctctaatctcaggctacaatcaactcatgagtgtttaagcttcacctacttgattagaggactatcaacctaacatatttggaatacttctgtaaaaagatgtgttcctcttcctattatttctttatttgatcacttattaatatgtgtattggtttatggatgtctatttcatactctgaagaagatccatgctacattattcattttatttttcaaaccaccacggctttattatgtgctgggagctcattgagtttggatcctgcatccttacagctcacctcatgcttttgtttttgaacacttccctgtttcctgctattataataaattctaaactcattttctatattatctttttcatacatagaatcagccatttttctaaagattgcttgcttctgatgttaaagaatagtatttaaaaaattgtaatactgggtatgtgcattgttaatgtggtataagtacttgcaggacctctcaaccaactggcctagtaaactatgtatctaaccttctgtaatgtgattacattaaaaatgagaacacactggtctctctacccaattatgctaccacatggatctttctagccttccttccttgactgtctataacctctcactgcaaaatgaggaaccccatccaaccatatgccattttattacttagctgcacaatttcaggacacatgcatagcagtatcagaaatgtaaagctgtacccttgtaggaaacatgtttatctactagaatagagtgcttatgttcagtttctttacactttaaacttacagagtttcctcattttcaaagttccttaggtcagcaacttcattttccactttcttcagtgaggtcatttcaatgacactgtataatttgatttatttgaaattctataaaagccaaaactgtagtcaagtgaacaacaacatatagaggatattcgaggagtttagagactggtataaaataagttaaaaagacactgtttaagaagattaaaattatttttagtgatatgcaatggttcagatatgacacaattaatttgtctaagcacatagttttgtgatggaaaatataaacctaaatatatacaattaaaaaaaaatttagcagttcattaacccaaggatcaaatgcagattgtataaaattatctcattacttattttgtgagggtggagatttcatgagatgtatgcaacaaagaatgaggtaattttcctgatttgcatataagatgttgccattcactaaagacctttaattttttaaattgttttttttttaaatcaattttctatgtgacccaggtttttttctcttgacaagcaaataacccacaggattattttctttccttggttgagaaatatttccccaaacttcagctcagttcaggcatacactgtccctgaatgggcatttaccctcagatgggtacacacacctgtcaacatgtggactcttctgtcagacaaacgcacctttactcacgtggattcttctctcagacaaacacacatgtccccacgtggactctttcctcagactaccacatatgttcttacatttactctttcctcagaaaacagacatttcctcatgtggactcttgtctcagacaagcaaacatgtctccatgtgaactcttcactcacataagtacacatatgtccacattgactgtttccttacacaagtacatatatccaatgtcgaattgttctgtggcaaaatgatctcaagataatgataatcataaaccccctccctgacaaggcatagatctgtatttttttcattgcaacctaactttgccttattgtcaagaacagtagtttgcagctctaaatataccaattagagacaggtgtccattttctctggaaacgtatttttatgttcttactggacatatttgttgataatgtttgctattatgaagataccccaacagtgtccacattagagaataaaaaatagtaatgggcagattaactctgtgcatccagacccagaaatcctttgaccttgacttccctgaaatgtagacacagaggatggatgagcaatgctgagcagtgcacccatgaccacaaaaagaaagacgtggaaatgtgtcccctccacttctcatgaaaggcagctcatcccctgttccctcaggccctggcgaggagccaccccatgtctgtgcccttcctcagtgtccacaccgtggggtctgcattgatctggattctcttctcatccccgtcaatattagtgtccttcgtaaatcaggtccagctgtggcttctcctcacggggctgttctcagtctgtttgctgtgttcacggaagtcctgtgtgaagtttactgatggagtcagagggggaaaaaatttacagcccagtggtgagactctcctgcaaagcctctggtttcacctttactggttacagcatgagcttggtccagcacgcttcacaacagggataggtgtgggtgccaacagtgagtgatcaagtatgaattctcagggttactttccatgagtacaaataaattaacaatctcaagcaacacccttttaagtgcagtctgccttacaatgaccaatctgaaagccaaggacaaggtcatgtattactgtgagtgacacagtgagggaaaccctgtgtgagcccagacacaaagctcaccgcagggagacaggaggggactatgtggtagatgctgctcagaaccaccagggggcatcaggaccatcagggagggtgcacagaaccaccaggaggggctcaggacaccagggggcgctcagaaccaccagggggccctcaggacaccagagggtgctcagaaccaccaggaggcgctcaggacaccagggggcgctcagaacactaggaggtgctatgaatcactagggggcgctcaggacacaagggagcactcagaaccaccagggatagctcaggataccagggggcactcggaaccgccagggggcgctcaggacactagggggcgctcagaaccaccagggggcactcaggaccatcagggagggtgcacagaaccaccaggaggggctcaggacaccagggggcgctcaggaccacaagggggccctcaggacaccagggggcactcggaaccaccagggggcactcagaaccatcagggagggtgcacagaaccaccaggaggggctcaggaccaccaggaggtgctcaggacaccagggggcgctcagaacactaggaggtgctatgaatcactagggggcgctcaggacacaagggagcactcagaaccaccagggatagctcaggacaccagggggcactcggaaccgccagggggcgctcaggacactagggggcgctcagaaccaccaggaggcactcaggaccatcagggagggtgcacagaaccaccaggaggtgctcaggacaccagggggcgctcagaacactaggaggtgctatgaatcactagggggcgctcaggacacaagggagcactcagaaccaccagggatagctcaggataccagggggcactcggaaccgccagggggcgctcaggacactagggggcgctcagaaccaccagggggcactcaggaccatcagggagggtgcacagaaccaccaggaggggctcaggacaccagggggcgctcaggaccacaagggggccctcaggacaccagggggcactcggaaccaccagggggcactcagaaccatcagggagggtgcacagaaccaccaggaggggctcaggaccaccaggaggtgctcaggacaccagggggcgctcagaacactaggaggtgctatgaatcactagggggcgctcaggacacaagggagcactcagaaccaccagggatagctcaggacaccagggggcactcggaaccgccagggggcactcaggacactagggggcactcagaaccgccaaggggcgctcagaagaagcagggggtgctcagaacaccagagggtgctcagaagcaccagggggcgctcaggacaccaaagggcactcatgagactgtggcaagggggtgctgagaaccacaggatgtgaccaagacaccaaggggcactcagaactgccagggggtgctcaggacaccagaggattctcagaaccaccaggggatgctcaggaaactagcgggtgctcagaaccaccggaggacactcagaaaaccaggggatgctcaggaaccaccagggggcgcccacgacaccagagggcagtcagaaccaccggggcatgctcagaaccaccagggggcgctcaggacaccaggggatgctcaggacactaggggcgctcaggaaccaccaggggacgctcaggacactagtagggtctcagaaccaccaggggatgctcaggacactagggggcgctcaggaaccaccaggggtcacccaggacaccaggggtcgctcaggaaaccagagggtgcccaggaaaccaggggaggttcaggaaccaccagggggcactgaggacaccaaggggtgctcagaaccaccagggggcgctcaggaaccaccagggggcgctcaggacactagtaggcactgaggaaccaccagggggcgctcaggacactagtaggcactgaggaaccaccagggggggctcaggacactagtaggcactgaggaaccaccagggggcgctcaggacactagtaggcactgaggaaccaccagggggggctcaggacaccagaggtcgctcagaaaaccagggggtgctcagaaccaccagggggcactcaggaaccaccagtgggtgttcaggacagcaagaatggctcaggacaccagggagcactcaggacctccaaggggctctttggaggcagctccatatcaggtacctggggaggatgaggtttccttttccaccttggtgattcctgacctggtcaagcaaaagtcttccccaggatctcttacgatgtcttccttgtaactcatggtttctttcacctataaaacattaacttagaacaggggttcaattcaacttttaactctgcctattttcagagttatactagcaatgatatatctcagtatattttttttaattgtgtatattcaatccaaagtctggctctatgcacaatttttttgttttctgtgctgtcagacacactattgtaaatgcttttctaacaactcagcatatgcatggggtccagtttcttttcctttcatcggctgtttgtgcagatgaaacaccactttaagggctcctgtcctccactttggcccctggtgttctgcttctcaaactttctccatcttctctttttctgtcaaaatattttatcttcctcagtctccatgcaggaaacaggaagtccttttacttcctgtcctccatgtctggtaaatcagttcacttcttttcatgatcactgaagccaaccaagtttaggagagtaacagttctccttagaatacactctacctgcagaccctctgccctcatcacacttttctagggtcctgcagacataacccccacccattcctctttttccctaagtaccacagactaggctctgcaacttatgctaccctctgtgtgctcagcccaggggctcagtagtgctttcatgaagtccaaatccctaatgtgtttgcccactctcagaccaccctccagcaagctgccattgtgattgaatcctgcaaagcatgggctgctttcagtttcctattgctggatgttctttattataaaggcatattggcaaataacgactagagtttgtattgaaaattaacgccaaaaagttttttaaaaagtttttcaaatagaaaagttctatcctgcctagtttaaaaaaatacaatgttactttaatcaatgatttaataaaaatttaagtgatgtttgtcttattagttattcaatttattaataactgactgatatttaaaaagtaaatactggctgggcgcagtggctcacgcctgtaatctcagcactttgggagggtgaggtgggtggatcacctgaggtcgggaattcgagaccagcctgaccaacatggagaaaccccctctctactaaaaatacaaaattagctgggcgtggcggggaagctgaggcaggagaatcgcttgaacctgggaggcggaggttgcggtgagccgagaacacgccattgcactccagcctgggcgacaagaccaaaactctgtctcaaaaaaaaaaaaaagtaaataccattgtacacttaagtaatatatttggcaagaatggcatttacattcattcaaaaatgaaactgcaaatacgagttacattcaattaaataattaaaataatatagaaaaaaatgggtgtgttgttttggtgtttaatatacattcatttttgcatggacgggtatatgtgtcattgctgggctgttgtgtatgtgtgcgtgtgtgtgtgtgtctgtgtgtacaactatgaagtttaaaatatattattaaattacgtagttatattaatccaaatttatcatgttaaaatattaggaaaaaaacaccagtagagaaattacagagaacatcagcaatgcctacagcatttacaagagtcacattaataacaaacaaactagttcaaatgtttagatatgacacatgcagtagaaaacgttcacatggtattaacacaaaaatggtgcacaactgaggaaattataatacgttcatgatattggctacataaatgcttatgatagtaatgcttttcatccatcaaatgcttatgataatgcttttcatccatcatattatagatgataaaacaactctataaacacttccatcactagcgtttaatatgagatgcctcacatctttttctgaaataaataaacatctgtccaccacttcgatgatcatttcaggattatcctctgaaataattatccataataattttagtaacaatattattttcagaagcctattttataaggtctttgaactattatttttatgattgttactttatattttacacactttttatttggaataattataggttatcagaacaattgtaaggaaaatacagtgtgttcacatccatctccaagttttcactaaagttaatatgtcaaaaaaaacatgggacatgggactaatatatttacattgataagtttctgtttattcagctctgggatttatttgaattttgccaatttttaacagtttccttttttcctttttcttttctttttgagataaggtgtcactttcctattgctttttgtttgtttctttgttcaacccacgtaaccacatcaaattcagtcaccatgttcctctcatatcttctggttaatcacagtttgggttcctgctgtcttcccattgaatattctataaatgaaactagtcaaataagttgattctggtcacttatatatttacctattttatcacgtttgttttgtcaatcacagtaagtgtcgaattcgctatctgttatagatgttagcctattttctatcccagatccattggttaaatctttggtgatgccttttagaaaactgatccctttaccctatgtaatatgccccttgattcctgaaagtcttatgtctaccttgtctgaatttaacatagctaagcacgctttcttttcgttcatattttcatggtccatgttttcctgtatttaacttttctatgtagagcaaatttctgtacagagctagtagttgggtcttgctttttaaatcaactataataattctattttaaaactggtattactatttttctgttaatttctgttttaatttggcattttatgatcatgtttatttctctattaacttattgtttagttcatcttttatgaatattgtattggccctaagatatacaataagaattgtgtataatcagattctaattcaaataacgtaaaacctcttcataggttgtagagctattataacttattcttctaaacactctttctcatccgttgtcttagtttattctcagtttgcacttatatgtgctataaaatataatatgtgcatttttatcattacatagacatatattagaacaattaaaaatataaaaactacatttcaacttcattttttcattcttgaccacatgttttatttggatagattcatgtttcggatgtatatcatatggctactcaccctggcagaaaatttgccaaagcacctactgaaggatgaatgcactagcaataaattttctcagaatcgatttgtcttacagggtattcatttgactttcgctttaaatgaaatttttaatatatatagaattccagtttgactttaatttgtaatttattttcttgtactcatgtattcattattttcttcctgaagatggtcacacattccattctgctgggccttcattatagatatttgtgtgtatctattcagggctatatttgcaatttatggatgccacaattatcagagttgaagtcagcttctgctgtccacagagatttcaagttcctcccatgatacttgcttttgtgtccctgtttgatcctgggtctttatatttagttttccccagggaggctgtctgtttcagctgtggaaagtgcaccctactgacagtttaaattgatgactgtgtggtgaaggaggttggacaaagcgggacttcctccaaccttctgactgagtctccttcttatgcaggagtagtaagcatagttctggggagtggccttccacattgtcctgtccttaactctttccccagggctggaacgtcttttcccagacacaactgtttttcaccagtgtccccagctttttacccactatccttaccctaaagagtaaggatttctttcctgaggaaggagatgggaggtgtttctggatcaagtttccttggtgtcgtctgtttccttttgtttctgttgacttcaccacagctcatatgacacatgctttggtggatttcccctggaggtagtggaggtgcattcaggcattccacaggagctgctgttcttttccccagtcaacaccacaagacaccagatgaggaagttgtccgtggatttttcaagttctctaggaaaagcttgcaagcactaggccaatctaacaccattagtacatgcatactaaaaaaaaaaaagtcattaagtatttctaggttagtctgtttctatctcaaatgccatccagtggcacctgccctacgtacactagcaggtaggtcctggttctctctgcaggctcctatcttctcagatttcagttttcttgtttgcttggtgaaatcaactcagatatgttgaatgttttttctctcttttatttgtagctgttcagcttcgttgttaatgaggtcagaataaaatcacagttttctcatttttttcacattcccacactgaatagctgctttccgtataaaagccagaaactgagagaacacattgaatatccattacaggtgaatgttaaacaatttgagatatgtttgtgtactggaataaaatgctgcattacaatcaagtcatcactcattcacataaaacatggccacattctcaaataatgtagggacctgagtgcccctccatctactggcctctcctggggccctagcctggccacaccttcttgcagggcagtcttggacgccctgggatcccgcaccaaaatttctgccctggcagaacatgcctgactggtggagagctccaatcgggcagccctcatgtgcacacaccagcttacacacttcctccgaatactgtaggttcacccaggcccacgtaacttcccacatcactttgcagtcacatgtctgtataggtgggttttgcttttcttgtcccaccattgcgtggagtgcagtcccctccccccaccccaaccaccatggcagaggaagctttggtggggaaaaagccagggccgctcctgtcagcgtcccgcacttgcgctaattctgcacagagaatagcagatcatctcacacattcagaaatcactcctgcttgtggggcatgaatacggcacccgggcctgtgcccacaagtgtcccatccctgagccaacacctcctccagtgtgaccttgaacacagtcaccaacagggccccacagacgcaatgcctctgccactgtggcgaacacctgcagggaggcaggcacccagacacccactagcactctgccacagctgccacacctccaacagcccaggacagtggattcctaaccttaaggagccggagaaccaagtcagggactagtataacttcccccagagtcagagcacacagtctaggtgttgggagctgagcactggccacctaaatttttccagaaatgaagccagttggctgaatccaccttataccacaatcaaaccctcaaggtcatccaatagggtaaaagaaaataaaaatgtatccaaaggtcagcaacttcaaagattgaaggtggataagcccacaaagatgagaaagaaccagtgcaaaagtcctgaaaacaaaaagggcgccctctttcctccaaacaaccacagcacctcttcaacagcagttctgaatggggctgagatggctgaaatgacagaaacagaactcagaatatggagagtgaaaatgtagatgaatacagctatttatggagaatactataaatgttcctcaaaaaataaagaaacaaaatctactgtagaatccagcagtctcactgctggctatgtatccaaaggaaatgaaatcaacatgtcaaagagatatctgcactccatgttcacgttcattgcagcattatttaaaatagtaaagatatggaaacatcctaaattcccatgaatggatgaatgaataaagaaaatgcatacagacacaacagagtaatgttcatccttaaataagaaggaaaccctgcctctgtgacagcatgcatgaatctagaggaccttatgccaagtgaaacaagccaggaacagaggaagagtcattcatgatttcactgtatatattaaagcagtagacttgcagaggtagagtagaatgttggttaccagggcctagaggggtggactgggaaagggagatgtgggttaaagtgcacaacgttccagttagaccggaggtataagttatgcctttctaatgcacagcatgtcaactatagctgataaggtagtatatatttcaaaattactaaaaaaataaacattagaatttccccactaagaaatgataaatttgtgaggtgatgaatataagcggcttgagttacccagttcataatgtatacatgtatcataactaaacaacatatgtcataaatatatgcaaaaattatttgtaatttataataaaataagtttcatatttaaataattacattaagaaaatgaacagaaactttcagatttcaagaatattttatatatatatatatatatcttaaaacaaacttgcaacagaatatagaaataagttttacgactcaatggaaaagaacagaattcaataaaaactggctaaaagaaacaacagctgcatcattatagaaaattctggaataatcagccatataaagattctcactctcttagaactagaattccgtaggacttgtaattcctcctgacctgggtgggaggcaaaaggaagaacagctaatggtgattcagtgagttttatacctgtgtgtacttctgtgctcactcagcagaaagaaaagaagaaaagaaagaaagagagaaagaaagaaacagaaagaaagaaagaaagaagaaagaaagaaagaaagaaagaaagaaagaaagaaagaaagaaagaaagagaaagaaagaagaaggaagaaggaaggaaagaaaagaaagaaagaaagagagagagggagagagggaaggaagggacagcagaagtcattgtggtgtgtgtgaaagcacaatccttgggctcccccacatccatctctactccagtcccatcaatgtccagcaaatacattttctaagatgaagtattttaaactttctaaatcctgctagaaaacccctcagctctttcagttttgctctatcacttgaattattgaattaaatctagtttttgtgggcctatcaataccataagccaaaataacacatgaagaaattgcactgagacacatgaaaaccttctgaaagctccataatttcagatctgcattcttatttccccgaacctaaatcactgaatagagactcagaacgagttgatcttgttcctgaacgtgcacagagccaaggacatcctgtctgtctggaacagctcaggtttgttcctgtttctcctagaggatataaaatcttgagttagggaaaaacagccagggacaccctgggctttgttcttctctcccctggaggcaggatgtccttcagagctttgtcccagtgggtaacacagctgctgaggtgtacaacccacgtggcctcgttttggtcacttttgcatggtgagcctgctttgcaccatggcctacaatatgcgtgtgtaactaatctgtctccatcttcaaaatgacattattccacatcaaatctagtgcaggtgcctcacacagaacattctcaattacctccatcattcataaaattgatgccattaatttcaagtatacatacatcagactcatttaacgtattgttattctcattgtttgaaacataacttttagatcaaataattaacaataataaaaatataaattttgaagtcaggtaatgtgatttctctagttgtgttctctttgctcagaatggcttgggctgttctgcatcttttgtttttccacatatattttaggattttttaaaaatttctgtgaagaatatcattgttgttttcatagggattgtactgagtctgtagattgctttaagtattatggacattttaacaatattgaatctttgaattcataaacatggaatattgttccatcttgtgtcctctttatttcctcaatgttttatagatttattgtagtttttttttactttgttcattacacattgtatgcctgtaccaaaacatcacatatacccaacaaatagaaatatatatactattatgtgcttataacaattaaaaattatgtatgtatattgaatctattcaaaatcagaaactatttctttttactgtttgtaaggtcttgtctctaggctataaaaagaatttgtaaaactcaacagaaagcataatataaacagaattctaaaatgagtgaaaatctgaacaaacacctcaccaagaaaaaatgttatctgaaaataagaatatataaaattgttcagtatcaattgtcataaactgatactcatatttaccaaatacaaaagtaaacatgatgtatttcaacagaattgattctcaaatatttgtatactcatacagtggaatactatcagtcataaaaactatgggttattaattcagaagacaacattttaacattttttctaagtgaaggaagatggacaaaagagactaagtattgtacaattccattcatgagacctgctaaatacagtaaaattaaaaggattttaaaaacaggtttgtgataggcagggcttttggggaaagacaagagactgacttggcaaagctcaggggatatttttagggtaaaacaaactgtgtgccattgtgatatgcctaatttcttattatatttgttcagagttaatagtgtacgtttcaaccaactcggtgattttatattttctatttgctgatagagacatgttcatttttgtcaatcactttgctaaatgtggctgagaggctgttgaaatgaacgctgagcaaatgtattcaccaaatctacaagagcaaattatttgccaattgctgattgagtggggtctataatgtatttgagattgggtgtggggatgttattgtgtgagatcatgatgtttagaccatgacactctctggtgagggatcactcattcattgcacatttaatgaaaggcaggtaggaggagcagaaggggatgagtcacactcctgaccacagccacaggttattgaaggcagaactgatgtaatcccctaaggtagaccactgcccctccaaggtgaccttatcctagagttgacacacatcctgggacaccagagacaactccttctctcccctttctctgcacttcagctggaagcaactgtctcaccgagcaccttgtgttaaggaatgagagttcctgttccaggtgtgagggcccaggtgcatccacttgatccagcacaagagcaagaacagccttccagaaaatgacatcgcctgaggtataaccagctctcacctgctgcagcttcctctgaataaaaaggaaactgttgaaacttcctcataagtgtcctgctgtgccattccctttgtccccacatgttcagttgtgtctgtccagatgtcacttttgtgtagggagattagggttctgcttccagtaccagaacacacatgacctcttaggggacttcagggttttgctgacatatgtgatgatcttaaaagtcattagctccatttctacatcaaaaaacatctgaaccaaaggagcacataggctcaggcctgtaatcccagcactttgggaagccaaggcagaggaatcacttgaggtcaggaatttgagaccagcctggtgaacatggtgaaaccccgtctctactaaaaaatatatacaaaaattagccaggcgtggtggcactagcctgtaatcccagctacttgaaaggctgaggcaggagaattgcttgaacccaggaggtggagattgaagtgagctgagatcgcaccacttcactccagcctgggcgacagagtgagcctccatctaaaaaaaaaaaaaatttatatatatatatatatatatatatatataataaatatatattatatatcatatatatattttatataatatatatgtatatttttatatattatacatacatatcaatatatgatatataatatgtatatataatatataatatgtatattcatatattatataatatgtatattgatatatattacacatatatattttgatatatatatatctccaaaccatctaaatatcaagtattttttaatccatctaagagctgaaattgctgaaaaaactactccctccaaaagctgtagagacaggcacatccacagtcacagcagagacttgctgacttggaagagaagctcctggagacacattggtgagaacatttacctggtgattatgctgaatgtctggaggacaaatgtggactagggggagggtgagcactcctagaggctgtacaccccacacttgtgtggacttgccctccagggccttcaggttctcgtggaagcaattaaaatagattccctatagccatgaactggggaggagtaatcacggagaaaagatgcacaaaaagacttttctagaaagctcatccaagggaaggtattctccaaaatcttagtttatgtgggggaaggaaatacttccaaattacagacccctcctcctcagccttcctctatcacgcaaatgataaaattagccaagaggagtcagattcaaggcggtagccctgggtgcagcatctgcagaagggaggaaagagagaaaatcagctgtatcactggagattccttgtgaaggtcactgctcaggagaagagggcaaccaaaccagggagagtcaactgtaagaacataccatgctcccctgccccacacattacctcctcaacagcatcattaatatggattaaagagggcagtgtgattgctttagatctgtttgagaaagaaagtcacatactgaggcctagggtcagggtcggcggcacttcccgtgagtaagatactacgaagaaggaaaaattaggggtccataactgtgaaaatcagccacagtgtgtgtgagaatgtttgtgtttgtgtttctgtgtgtttgagtaggagttattggaacagcggacgtggagtgagctttaatccacatccatctgcagcttcaggtattctcagatgcagtattcatctgcaagagccgaaatgagaaaagagccacctccaacccccccagagttttagcctccctttgtttccagtgatccagtgcatctagacctccaggaagtggactccctggtgattttagcgattcttctcttggagccaccctgaagaggacattgggtttccaaaggcccattcactatttcaagaagtggtgccatcagctcatgttgtcactgaaggagcattctgagccagggcacagtcacttcctagtgagctacagaggctgagagaaaaatgctctgtgagacccaatgggaagctccctgcagtgcaaggtctgggtggcagggagcgctagggcctcgcccagcacaggctgcagccctggagcaggtgcaagggaggctggggaggggttcctcccagggtctgatgtcttccttttctcggacaaacatgctttaataagttaaacaagactttagtaaagactattgatgtgtctttgtgtctttcagtatacagttctatttgtaggatttatctaacctaacaagtcaatgagaatcacatgtaaaaggagaaatttctaggattttcagatatcttaataggtaggagatggagaaaagggatggttttattaattcagtgcttgccaatcttaacagagacagtagtaagacatgcagaaagcaaagcccagaaaagtatgaaggtgtcaaagtgccatttaagtatgggttcacttggaggaccatgttctgcgggaacttgttttcagcagacaatctattttagcagagttctgggcatacaaggggacacacatcattaaacaaggattgggacagggacttcagcgtcccactgttgcatggcccataaattatgtgtgttctctttctcatcttggatcaagtctagagctatgaaatagtatccctcatgaatatgcaaataacctgagatttactgaagtaaatacagatctgtcctgtgccctgagagcatcacccagcaaccacatctgtcctctagagaatcccctgagagctccgttcctcaccatggactggacctggaggatcctcttcttggtggcagcagccacaggtaagaggctccctagtcccagtgatgagaaagagattgagtccagtccagggagatctcatccacttctgtgttctctccacaggagcccactcccaggtgcagctggtgcagtctggggctgaggtgaagaagcctggggcctcagtgaaggtctcctgcaaggcttctggatacaccttcaccggctactatatgcactgggtgcgacaggcccctggacaagggcttgagtggatgggatggatcaaccctaacagtggtggcacaaactatgcacagaagtttcagggcagggtcaccatgaccagggacacgtccatcagcacagcctacatggagctgagcaggctgagatctgacgacacggccgtgtattactgtgcgagagacacagtgtgaaaacccacatcctgagggtgtcagaaacccaagggaggaggcagctgtgctggggctgagaaatgaaagggattattatttttaatgttgtttacagtatgtcattaataaattgaaaaaaagtaacaatagaagtatatactctaattatatgggaactttgttttttcagttttttcatttttttttttttttttggtttgtttgtgacagagtctcactctgccacccaggctggagtgtaacggcacaatctcagctcactacaacctccacctcccaggttcaagcaattctcctgcctcggcctccagagtagttgggattacaggcacccgccaccatgcccggtgaatttttgtatttttagtagagacggggtttcaccatgttagctaggctggtctcaaactgctgatctcaggtgatctaccctcctcagcctcccaaagtcctgggattacaggcgtgagccactgcgcctggcccaattatatgggaattgtttatataattatcaccctataagcaaaattcatggaggaggaaaagctctactgaagaaagctgataccggcattcccatgaaagtatctgtgtagaagtaagtattaaaatcagttgaataggcaaggcatggtggctcacgcctataatcccagcactttgggagaccgaggcaggtggatcacaaggtaaggagttcaagatcagcctgcccaagatggtgaaaccccttctctactaaaaatacaaagaattagctgggcgtggtggtgggtgcctgtaatcgcagctattcgggaggctgaggcagagaattgcttgaacctgggaggtgaaggttgcagtgagccgagatcacgccactgcactccagcctgggcgacagagtgaaactccatctcaaaacaaaacaaaacaaaacaaaacaaaaaaacagttgaataaagtaccttagagtcatctgttcaattaacatgtttaactccaaagaaatactgaaaatattttccaaaaaggaagtgccattttacgttcctaccaacagtgaataagattttcttttctggagccttgtcagtattcactaatgctttgctgtgcagccgttgtaatattatagtaaatgagtagcagtatttaatggttgttttaaatatacatattcttaatacaaagtcttgatgaacacttttttatacattgttttatgaggtgtgtgttcagatctatgtatgccagaaatgcctggcagcgttaatttaagcacactgtgagaatgaccctatagtttatgaagaatgtatgttcagagctctgagctaagaaatccaggagctgtcaacccagaagtttattccttgtctgtgaaggacatctgaatccctggcctatcccttggaacacaggatgtccaggtgattgatgctctttgttaaatctggaggttgctaggtagagggtgctaagtgaaaatcataatataaactacacgtgttttacaaatggtagtggttttcctgtccaacacacttttcctgggccacattgtatgcaagtcctcaatacaccctaggtcttgttcatgggctccaggtctcctcttcagccttttggacatggtgccatgcctattacagtcaataggggtctagcatgacaactggtaggcccagaacaaggtcaaagaaaatcctgcaagctcttagacaacagtgtcaaggaaggggagacctgtggggaaatcccaggcaggccatgcacatctctgtgggcccaacagctgcaatccttgatggatggggcccgctgcatgtgtacggggatgcctccaaaatgccaaaagttctggaggacctgttgcctgaggtggatgtgacaatgtgacaaagtgacagtcagattcctgagctgtggcagctgttggccactcctgactgcactctgagcaaccactgaggcagagctcattgcacaggctagggtgtgtcagccacgagaacagttgtaactataatgagatgccgcctgtagggataggatagcaaattggagaccattgtttatttggtaggccatttaaagtgttgctgactgccacaccaatgcattaggactactatgactacgtcatcctgggagcctaagtcctggcgtccgatgtagagctccagtgggaaggagatgaaggttaggatgagtccataaaggttcttgctctgcagcccctgctttgctgtctcacttggtgaacagagaatgggaggtcaatgcggacaaagtccagggtccaggcttatcagtcaaatacttggtgtcatctggttacataagactatagttattccatatttcatcatagataagataagatgcaggtctactcatgtcccaccacaccaaagcagttggaaacctcccaaggcctcctgggacattggcgatcctttattccccatttcggcaaaccccttgggcccccatggcacttagacaagaaggtgccccactgcgactgttccaaaagggaggatgagggctctgaagaagctgaagtcacagtgaaatgaatacaaaccttgggagttctagtgcagggacagccctgtgaattggatgtagtcagttaccctgaggggtttaggtggggactgtgttaaaggcaaggacataagtgtgtgtccctaagaccctggtctcaaagacagaaggaagctgaagtgagatatactgtttaggagtagcaactgcactacatgtcatgccttacgagtgtaggatgtgacaaagagggccactccacatccggaacaacctttagcaggctggctaaaggatgccttccagacacaaaagccttggaatgccaggacacagtctgtagccaaatggtacttgtggtggtcaccaccaacataaaagtgggccaactgtgccagcagaagttagccccacagaactttcccccacctaagagaaggcagtgcaccacaatgcggaattccaccactgtggaattgggggagcttagaattggattcagacacaaggggagagagtggatcacagggtggcttctctatgggatagggggtggagagtattatactctctggactcaagatgagtaaaatgacacccatcacaaaccatccagccctatgatggcacctttatggtaagtggttgcaggctccaagggggccgggtccaatgaggaagatgcccccacagctcgttctcaatggcagactatagaagagttgcaggatatcttctgggagtcgagatgaggcatgctaattatgctgagaattattgaagtcccaacaatgaattgtttactgcaaaataaaagctacagttatgtattcagtgcctacccaatggcatggtgcactgatttccacgttaagccccctgggagggcagccaacatttcatgtgccccaggtagttgctgacttaggagaaaagaagaaactgagtaagcaagggatgcaccctactgtgatgaagaacaatggcaccaaaggaagagagacagccaaggagccagtcagggtggccagacaacgaatgtgctctaactggcaacacctaccagttctctgggcccatagcggcaataggtggttatggaagggccacggaagtcagaccggttgaactagtgatacgacctgggggactgccacccagaccctgtgtagtatacacagcttccatcctagaacacatgagaatggatatcttcttaggcgtgaccctccaaacaacggccagggaattccaacggagagttagagtggtgatatgtgtgaccaagcagaaggcaaactggatgccagtagagctgccaacccatggggagtcccacagctggagcaacaccacccgccctgggaggggaagatgatccaatcatgaagattgttaaggagctagcccaggtaggcattaggaggccactgcatggttcctacaacagacctgcatggcccatgcagaggccagttgagacatggagaatgacagtagattactgggagttaaataaggtggtctcccgagtgaatgcagctgttcctaatatctcctccagtctgacgagaataggagaggtgttagccacgtagcatttccttatcagtttagtcaataccttcttcagcatttctgttgccccagagtcaagatcaatttgcattaacctaaaaagaacaatggacttttactgtcttgttccagggatatttacacagcccaaatctcacagcctagtgacctccaacctcagtcgatgggctgacccaaaggggatacatgttttccactacattggtgttatcatgataacctctgagtcttttttcagcttataaattacagcccctgtcttgctgtctcacttgctgaatagaggatgggaggttaatacagacaaaatccagggtccaggcttatcagtcaaatagttggtgtcatctggttgggtaaaactaaagtcattccatctgccatcatagataaggtgcaggcctacccacgtcccaccacaacaaagcagctgcaaactctcaaggccttctggagcatcagtgtccttttattccttttatttgacatccctgaaggaggctgctaggggagactgtgtccctcctaaattcatgtgctgaagtcccaacccttggtccttcagaatgaaatcatacttggattagtgtcctttaaagaggtgaataagttaaagtgagattcctggagtggggccctaatgcaatctgactgttgttataagaagaggaagcaggagggagggtgcacaggccccgagggacggccatgttaccacagaacagtgagaaggcgccatctgcatgccagggagcgagacctcagaggaaacccacccagctggcagcttgatcttaggctttcatcctccataagtgtgaggaaattggttttgtattgtaagccatccgatctgtggtatttcgttataaaagccctataaaatgaatacagtaggtaataggagagcttctatacattgaaaaagtcggatggccagaaaaacctagacactcctgttcagacctgagcagggtgatggacctgctttgggacaggagaggggaagagatgaacccagcacccagacccagctgagcccattcctcagcaggccgtccctgggccggagcttgcacaggtgtgaaagagcctgtcttggtcttcaggggctcatggagttggacggagaatggtgtagactcaagaacacgtcatcggtgtgcccgtgtttatctgaatgggatgtgtttctagggtgtgctcatccccaaagaagaattaatcaggtctcttgggctaaaaagaggttgtggcatttgtgtgtattaataactgtggtcggacagtaaattatgttaaactgcttatgggaaggcacaatggaaagaaacactttgttacagaaggaaaaaaaaggtgattatttaaatgaggtgcctttgaaggtcaccatgccaagaggagcccatcacatgatagtgctggctttcatgttcaggagatcaggagggtccgtccgctggcttttatgacaccctagacagagctgagagtgtaatgtatgaatggaggggaagtggagagaggggaggccaaatgtttggtgggaatggagggtcactattggagccattaggaaatacacaagcatgaattatgctggaggacagaacagtgttcctggggaatattgtgttgctttgggagctgctgaacatacaggagtttcactgttcctagttctcaaattctctagactctctggacaacccagttttaaatattgggaatataggtaagacacattcgttattaaaaattattaagagaagatgtaggaagaaatttaaagtaatccatttggttatgaaaatttagttacagcgaactgtgatgtccgtttcttacttggaataatggaatgtaagtcattagtcatctcaacggttcatttttccataaccatcaattacaaaactgctgagtaatttcctgaattgcccaccatagaaactgacctcacatttcctcaatgagaaactgccagtcccgttgatccagcctcgttcttcccatcagggattttgtatctctgtggacgtgtggcacagtgctgcatatccatcggcatatggcctcaggaaaggcgccagcctatccatgcatgatgaagcttacttaggggatgaagcccgcatgctgggtgagccagtgccaacagctgaaagaatcaactgcctggtgtatgatgcttttatgaaaacaagcccagggcctcttgcattcttctgtattagattctctggtgaagatttttattcatttctgcctgaaattgccacatataattacctggaagcattacaataaactgatttggaagttaactgacttcctggtgaggttaaaatgagtgtcaggtgcatagtgagacagaccggagacatggatgcatagcaaacttgtgctcaccatggtttctatcttagttagggaaacttctgtaccttccttagatgttcaggcactccattgaggaccctggcataacattatttattgacagaccatagctcaaagtatagaactggatactaccaaggaggatatactattactattttatctttatcttaaaatatactcttccatctgaggtgaaaattaatccagatggtagaacttattgcagttactacagcattttagcaaatcaaaagccgcagaacaaacatatggacagatggcaggtatgttttcggaatcgtaaacaagttcgtgatgactgtaaaaccaaggggtgtctcacgagggctggaaacctctcacaatgaaacaacacaatgaggatctttgaaaagtactctgacctcctggtgagctggctgatatggaggctgagctccatgtagaaagccaaaggaatttctgcaggacgtcatcatgccaagcacagccgtaacctgggtcccagcccttttcacacgctcaatggttagatcttgggagggaatcaaagaagccatagtaaaatatcaaaatttaaaccccgattttgaatttaaaaagtgttaaaatatggttgtggcctacactcagaaaatctgtgtccttcagatggtttctcagtggcaccagatggtttcaagtggctattcattaagtttctcagtgaaattaccagacatagaataaataaattgtcactgtcttaaatcaacccatgggaaaggaaaactgtgtaaatacagcagagaggaaacattgctcaagggaaaaacaatctccagaaagtattgttaaagaaacagaggccctctttccagccagcgccgagcgatgggcacctctcgggacaactggcacaagggccgcaaagctgggggcaagagaaggccctgccacaagaagcggaagtatgagttggggcgcccagctgccaacagcaagactgacccgtgccgcatccacacagtccgtgtgcgaggaggtaacaagaaatactgtgccccgaggctggacgtggggaatttctcctggggctcagaatgctgcgctggtgaaacaagggtcatcgatgttgtctacaatgcatccaataacgagctggttcgtaccaagaccgtggtgaagaattgcatcgtgcccatcgacagcacgccctaccgacagtggtacgagtcccactgtgcactgcccctgggccgcaagaagggagccaagctgactcctgaggaagaagagattttaaacaaaaaacgatctaaaaaaattcagaagaaatatgatgaaaggaagaagaatgccaaaatgagcagtctcctgggggagcagttccagcagggcaagcttcttgcgtgcatggcttcaaggccgggacagtgtggccgagcagatggctatgtgctagagggcaaagagttggagttctatcttaggaaaatcaaggcccagaaaggcaaataaatccttgttttgtcttcacccatgtaataaaggtgtttattgttttgttcccaaaaaaaaaaaagaaagaaaaagaaacagaggcatcacacttactagaaaaacatattctatttcatatattatggggatatgacgtgatgttttgacatatgcgggcattgtgaaattattaaatcaagtaaataaacatgtccatcacctcacatacttattttttatggtgtaaacgtgtaaaatctactctcttatcagttttcaagtatatagtacattagtatcatggaagtcaccatgctgtgcaatagatcttcaaacgaattccttctatctaaccaaaactctgtaccctttcaccaacgtctcagctttcacatgcccctgacgccagcccctggtaggcaccattctactctctactctgagttcaacatttttagattgcatgtgtaagtgagatcatggagtaattttttatacctggcttatttcactcaacataaagagtcaaatgctcaacatcactaatcatcagggaaatgcaaattaaaaccacgataagatatcacctcacacatgttacaatggcttagtctcagtctgtctttttgttactataaccgaataccagagactgggcaatttctaaagaaaaggaatttatgctttatggtgcttgagtcagagaagtctaatatcaaggcactggcatctcacaagggccttctcactgcctcatctcacagcagaggtgggtgagcaagagaccatttgtccacgagagaaaagagaccatcttttattagaaattcactcctataataactaacccactccattgatagtgacagtaatccattcatgaggacagagccttcatgacttgatcacataataaaggtcccacctctcaacactgttgcattaaagattatttccagatcctaaactttgggagacacatttaaaccatagcattccattcctaatatcaaaatttatgtccttatcacaatgcaaattacattcattccatcccaattgtctccaaagtcttatccagcatcagtgcaaaagtctgaagtccaaagtctcatctaaatcagatatgagtgtgactcgaggcacaatttagcctgatataaattgtttccatctgcgagcctataaagtcaaaacaagttatctactttcaaatacagtgaacaatggggcaggtatgggatagaaattcccattccaaagctcagagagaggcaaggagaaagcggtgcctagttcaaaacccaacagggaaaaaaacattaagtcttatagctggaaaatcatcctctttaacggcatcttgtgcacactggggagggggatgggcccccaaggcctccggcagtcttgcctctatatattttctgggttcagtccactcagccgctctcacaggtgggactctcaggcctctagctctcctaggctgactggaaactctttgtggtacctccaaacccacatttctgcttggcattgtgctaagggcccagtgtggtgactctgtctctgcaacaagtcactgcccgagaccttaggctgtccttaggctgcccgagaccttaggccgtccacagcattctttgaaatctaggtggagaaagccatgccctcgtggttcttgtattctgcacacctgcagaattaacaacacatggatgccatggaagttgatgacttgtaccattaaagtgatggcttgagccacacctaggtcctcctgagccacagcatgggcagccaaggagtgctgtgcctggacaccgggaacagagtcctaaagtgcctgctagaagtcaggccatagatttccttcaaatttctcccaccatataacctcgttcatggctctgaacttccaccttacagaaggacctagggatgaacacaattcagccacgttctttgccactttatggcaaggatggcctttgctccattttccgatgagctattcttctttttctcctgagacctcatcagaacggcctttattgtccacggttctactgacattctaatggtcatcacctaaataatctctaagaagtttcagaatttcctcacagctctcttcttctgagtcctcaaaagaatcacctctagtgttctattcagggcaatccagactttttatagtctgatcctccaaattattccagtctttgtgcattactacatccacttctacattttggggtatttgttatcgcaacagccccacctcttgatactgatttttcgtcttagtccactttgtggtgcaatgagtgaataccacacactggctaaagtataaggaaaagaaatttattttctcgcagctctagaggctgggaagtcaatatcaaggtgttagcatctggcaagagccttcttgctgtgatgtccatgtggaaggcaggagagcaggtgcgaaggatggaaaggggtttaaactcattttttaatgaggaacccaggcctgtagtaactaatctgctaccacaatgagtaacctactctgacgataatggcattcattgcttcatgagggcagagccctcatgacctaatcatttcttaacattcccacctctggacactatggaatttgggattaagtttccaatacacatcctttctaaacagcaggggctttttaataggttgaccacccaaggctgcaggaggctctgaagcagtggcctgaggttggctgtcctttgtgagaatggagagaagtgaactgactcatggagacacaagtagatgaggtaaaggcattcattgcttcattacatggatggtgaggtcgattgaaggcattaacggattaaagatggtggcaaaaccgtctgaggtggagaccacggggagtccatcagaaatggaggacacgtcccaataaatggtgcttcatttccctgcaaagcagaagaaagcaaagaacaaaacacaacatcatagtgtacactgagcagtggattgagagaagagtttcctaaggcataactgacagagtggagaagacacacaaatctttgcatgatgctaacatttggactgtggcttcattatttcttattaatattttactgaaatatcgctagaaggagactgaaaatgaagtgtgaaaagttaaatgggatttctgctctatgtccttttcagatgagaggaactagggaattccagggaagaaacaataatagctgctgagcaaggcttttgcagggcaggacaaggaatccccaaagagaaaacggaaacctcagcttcactttgcatctgctcctgagccaggtcctgagcgacccctgtaggtcctgagtgcccctccgtaggttctgagcatcccttggttgctgggcgccctctggtggtgtctgagcccctctggtggtttctgagccccccgccttatgtctgatcctccctggtggtgtccgagtgcccctgctagtgtctgagccccctggtggtgtctgagtccccttcttagtgtctgagccaccctattagtgtctgaggacccctgatggtgtctgagcccccagttagtgtctgagccaccctattagtgtctgagcccccctggtggtgtctgagcacaggagagctcctctgaaggaagggtctacatggggacaggcgtgcttgtctcagggaagggtccatgtggggacaggtgtgcttgtctgaaggaaggttccacatggagacaggtgtgcttgtctcagggaagggtccacatggggacaggtgagcctgtctgaggggacagaagtgcttgtctcaaggaagggtcctcatgtggacaggtgagctcttttgagggaagggttgacctggggacaggcatgcttgtctgaggtaagggtcctcctggggacaggtgtgcttctctcagggaagggtccacgtggggacagaggtgcttgtctaaggcaagaatccaagtagggacaggtgagctcgtctcagggaagggtccaggtggggacagttgtgctcatctgagagaagcgttgaagtggggacaggtgtgcttgtctcaaggaagggtccatgtggggacaggtgtgctagtatcaagaaagggtccacatagggacaggtgtgcttctctcagggaagggtgcatgtggggacaggtgtgcacatcggagagaatggtccacctggggacaggtgttcttgcctcagggaagagtccaccttctcagggaagaagtgtgctcctctgagggaagggtgcacatggggacaggtgtgcttgtctcagggaagggtccatgtgggaacaggtgagctcatctgagggaagagtccacgtggggacaggtgagctcatctgagggaagggtccacatggggacaagtgacctcgtctgagggaagggtccacgtggggacaggtgagctcgtctgaaggaagggtccacttggggaccggtgtgctcctctgagggaagggtccacgtggggacaggtgtgctcctctggagggaagggtccacgtggggacaggtgagttcatctgaaggaagggtccacatggggacagttatgctcctctgagggaagggtccatgtggggacaggtgtgcttgtctcagggaaaggtccacgtggggacaggtgtgctcaccttggggaagaggacagatgagctcatctcagggaaggggccatgtggggacaggaccaagggttgggacttcagcacaagaatttaggaggaacacagtcttccctagcagcctccttcagggatgtcaaatattttccttctgttccctgtgaaagccttaaaggggtagggaaagggcgttcaacctgcacactcgtagaggggaaaccagcttcattagtaatcgttcatctgtggtaaaaaggcaggatttgaagcgatggaagatgggagtacggggcgttggaagacaaagtgccacacagcgcagccttcgaaacacaccacggtcacgttaagtttaaatggagtgaccacattcgccaggaaagggaaatatttacacttttgaagaaacagtaatttgtgtttctgattatgatctggccttggattttccctcccctcataagcaatgacagaattggcagaaatatgtgaaacgttagttctcagacatgagacacccacagagggccccctgtgcccttccctgagagctgatcagctcctgcatctgaagaaatgaccaaagaccaggagagaaccacacagaagcatcggagggacagcacctggggctctgatggggtcaggaatagcatctgttcccaatagatggactaagtaaaaagtatcataattcacaagagttttacatagcacagaagaaaaagttaccctatatcaactgttgatcttgtgaatccaggaactctggattcaaggtggtcgggcacatcttgatttacgcatttcagggacacatgagacatcagtcaatataagtaagaaggacattagttccatccagaaaggctgagacaactcaaagcaagtcctccccacttagggcttccaggtcacaggtaggtgagagacagatggttgcattcttttgagtttctgataagtgtttgcaaaggaggccatgaggatatgcacctgtctctgtgagcagagggacaactttaaatagactgggaggcagatttgtcctgagtggtttccagcttgacggggcccaagatattttcctttcacaatctggtaacttcaaacaaaacttcaaagccacaacaaaacaacacaacaacaaaaagaataagacatgggtacttattaagagtagaaaaacattcagtccccaaggaaaatattggcagtgtctacctccacatgacaaaggagtaagcagtgtgagccacagaaaggagcactattaacccacagagcaaccgagaataacacgggtgatgcgagggcattggacgcacatcattgcattttgtagattcagaaagaaacggaaaagattgacggtggtaaaagagacagccctgcttccctctcccttttccctccccgatgaggcctcacagccatgaccctcagcctcatcccgcagtgcagcagctgccgtcctgtccaggcccaccccctgccccgccctgggactgttacctcattccctcccggagtccaggtgccccccggggtgtggtgcgggagcctggggaggccctttgttctctgtcagggtctccctgggagggacgcagccaccgcagctggttggggcctggcttcgcccaggacagtcctttcctttcccattgtctttggatgactatcgctgggctgggacatgaggcgggcagaggcgcgggtcacccttaggacccccctcttgctgctggggctctgggcgctcctggctccggtccggtgttctcaaggccgtcccttgtggcactatgcctcctccgaggtggtgattcccaggaaggagacacaccatagcaaaggccttcagtttcccggctggctgtcctacagcctgtgttttggggtcaaagacacgtcattcacatgcggaggaaacaccttctttggcctagacatctgctggtgacaactcaggatgaccaaggagtcttgcagatgggtgacccctacatccctccagactgctagtacctcggctacctggaggaggtgcctctgtccatggtcaccgtcgacacgtgctatggggacctcagaggcatcatgaggctggacgaccttgcgtacgaaatcaaacccctccaggattcccgcaggtttgaacatgttgtttttcagatagtggccgagcccaacgcaacagggcccacatttagagatgatgacaatgagacagaccccctgttctctgaagcaaatgacagcatgaatcccaggatatctaattcgctgtatagttctcatagaggcaatataaaaggccacgttcaatgttccaattcatattatcgcatatatggcaatattacaacttgttccaaagaggtggtccagatgttcagtctcattgacagcattgctcaaaatattgatctgcggtactatatttatcttttgaccatatataataatcgtgacccagcccctgtgaatgaatatcgaattcagagtgcaatgtttacctattttaaaacaactttttttgatacttttcatgttcattcatccacactacttattaaatacgtgccacatgaatctaactatgaacctgaaaggtataacttctgttcccgtatagccctgttacacattggtactccaggcagacattatttattggtagccgtcataataacccagacacagatgagaagtattggtctggagtatgatgataactactgcacatgtcagagaagggcctcctgcattatgcagcgatttcctgggatgacagatgcgttcagtaactgttcttatggacatgcacaaaattgttttatacattcaggccggtgtgtttttgaaacacttgctcctgtgtataacgaaaccatgacaacggttcgctgtggaaacctcatagtggaggggagggaggaatgtgactgtggctccttcaagcagtgttatgccagttattgctgccaaagtgactgtcacttaacaccggggagcatctgccatataggagagtgctgtacaaactgcagcttctccccaccagggactctctgcagacctatccaaaatatatgtgaccttccagagtactgtcacgggaccaccgtgacatgtcccgcaaacgtttatatgcaagatggaaccccgtgcactgaagaaggctactgctatcgtgggaactgcactgatcgcaatgtgctctgcaaggcgatctttggtgtcagtgctgaggatgctcccgaggtctgctatgacataaatcttgaaagctaccgatttggacattgtattagacaacaaacatatctcagctaccaggcttgtgcaggaatagataagttttgtggaagactgcagtgtaccaatgtgacccatcttccccggctgcaggaacgtgtttcattccatcactcagtgagaggagggtttcagtgttttggactggatgaacaccatgcaacagacacgactgatgttgggcgtgtgatagatggcactccttgtgttcatggaaacttctgtaataacacccagtgcaatgtgactatcacttcactgggctacaactgccaccctcagaagtgcggtcatagaggagtctgcaacaacagaaggaactgccattgccatataggctgggatcctccactgtgcctaagaagaggtgctggtgggagtgtcaacagcgggccacctccaaaaagaacacgttccgtcaaacaaagccagcaatcagtgatgtatctgagagtggtctttggtcgtatttacgccttcataattgcactgctctttgggacagccaaaaatgtgcgaactatcaggaccaccaccgttaaggaagggacagttactaaccctgaataacactaattcagcctcccgatccctgtaaagatacagagaatataacagcaaaatctatgaaacaggatcaggggaagggatggcaaagctcaagtccacatttcttgaagtccacaggaagcacagggtcctgtttcacatcacagggaaacgggaggcattggcttctgtcccaggttcttgtaggtcgctgatgctcactctgaaataaatcttcaaaaacacacattggtgccttccacattttcttagactcctctgggagcccaaacttggccagaacctcttgcctggagagacatgaatgagcatctggctcttgtcctgaggtctctggtcccagaattaacggaagttgccaccagctccttacagggaacattcatgacatttctccagaagagagctccagagcaatgagcttcctcattccccaggtaatctgtccttctctaaacccgaagtcagtttagggtgatccagggctactccctgttccctgtctgttcctcacgggggtgctgtgggctttgcagtgagagggacttgggttcaaatcccccaccaagcaaatccccctacctggggccgagcttcccgtatgtgggaaaatgaatccctgaggtcgattgctgcatgcaatgaaattcaactagaaaaataggtagacgtgaggggcaagctgtctgtcatttagtgtgagctctgtgagtggcagctgccccctttcttcctgcccccacatttccttgaactgaaacaggaagggaagctgagtaagtcgtgatgaggaagagaaaccaggcttgtagcagcacaggctggtccgggtggaaaacagggctaggtgtatcactgagttattgtaaaggaaaatggaagttaaatgtataaataactgaatgagataacattttattttaacttaaaattcacactaatattgacttttaaaatgcagtgtagatatgtcagagagaatttcaaaggcaaagcccaccgacggaagaaatcacccttcccataccatccacagaaaactgttggtattctagggtagtactgagatctagcatttttctgaatacatctgtggttctagatgtcctgcttccatagatattgtttagaattcccacccctttctccaaacacagcttgatatcctttctctgaacctgttagaaatttcctccattcagctgtcataaagatgcgagcaatccattcctgtgcctctgtcagtgtgttctattattttgtggctgaacgctaatggacagttaagtgtgaggtcagtgaatacagtgccctccctctatgtgtccttcgggtgtgaggggttttgctgatagagcagcaggccccatcccaccctttatgcatctccgccccccacctcacgctccagctgacctctcccctgtggcctggggcgttccccagggggaatgacctctcctctctccagggcccacccactcagtgcccgtgcaagaccaccacgcttggcacggccccacctcgtgtcagggcctgtgtcccctgccccaccccctaaacagatgggaaccactgggactctgctcagggcagggggcggaggtatgtgtgaaaggaaggcaaatgtgcactctgttggagaaatattataggtagtttgagcaaaaaatctaatgccatgggaacttttagaatgatacgtattttaacaaagaacatgaccaatagagtttgtattgaagccaggaaaacactatttagagcaacagcaatatcaaaaacacaagccaacagttcaccaagaaaaaccaccattaaccccatggaaatggtcttccaagagcatcggcacttaaatcctggaaatctgcctgcctcagcacctgttgtcctgacctgccctcctgtgtgtcctaatcactcccaaacacggggcctgcactgtgggagattcacactgtgccaggtggagggagcaggacaactgctaacaggttgttggtgtggatgccgaggccacccaagcaggtgtaaactcccacctgtggggcagggaagagtgcacgggagacatgtcccgggcatagggtgagggagagctgtgggggctctgggttctgaagtgggttctgaagagggttctggcctggcagggataagaccaaccagcatgtgaggccaggctggagtctggacctctgaagctgcaagggtcatgggctgcttggccccaggggctgtcctggttctctatggagtactttcaaacattctttcttcttccaatccccctccttctctcccaaagcctgcatctcccaaatcctctttgtcggatcctcggcttcactctgcatccgtcctgagcatcgatcttccaattccatcctcttctcttctgctatgtctaagctgctgtgaagccacctgctgtaatttactgctttatatttaatattgtaccgtacatctgttctgtttccctcatcataaatgcttcatttcatgctcagcatctgagaacacaaggccttgtcagctgtcacctccttccgttctctgtttccttcctcctatccccatattgctcatcatgtccagtctcctgccatcctgaatgcttctgatggaaggtctgagatgtctcatgagcactgtgaagattctttgtaatgtgagcttgttccaggcaggaattctccttcacccagccctggaagccaagtataggcagatggccatgctcaatcaaagactgagctaacttaacagtggctttggttttaaggtttctccaatccccagggcacaggatttcagggaattcaggtgagagtctgggtgttacccttcaggaggctgtaaactccatttcacctagtctacaccacagactatggaaactatatatatatatagttctgtccctctagagaaacctaatatgtatatatacaatatataatacgtattatatattatatataatacgtattatatattatatatattatatatatattagagtttattgaggagtattaaactcacaatcacaaggtcccacagtaggccatctgcaagctgaggagcaaggaagccagtccgagtcccaaagctgaagaatttgaagtctgatgttcgacggcaggaagcatccagcacaggagaaagatgtaggctgggaggctaagccagtctagtcttttcacgtttttctgcctgctttatatcctggccacactggcagctgattagatggtgcccacctagattaagggtgggtctgcctttcccagtttactggctcaaatgttaatctcctttggcaacaccctcacagacacacccaggatcaatactttgcatgcttcaatccaatcaagttgacactcagtatcaaccatcacaagtccaccccttgtcaacttgaacccatacaaatctcctgagatcatacataatcttcaaataaagacaataataaggtcataattacacctaatgtaatacaactatcttttgtacaaccagaaatgcaccaatccccaacccaaatgctattatgtaaagttaagaacacttaaatgctgatatgaagtcaataaattttatgtcacatgataaaggaaaaaagaaatgaaggaattttcttagtacaagtgtgtacatgcacaaacatgtttttaacaaaagaagaaggaaatactgatgacaattacagtcctcatttctgcaactgatcacgtggttgtagctggtattgatgactaccttcttctactacccattctgtattccctttgccttcagcaagcatcacagcaggtagagttttttctcctagtggagtgatgcaaaccttcattcctgaagggtctgggccatttgtagtcctgcctggattgggctgttgtagtttcccgttgaccttaatgacagggcatggtaatgttaagagacgccctaatggatctcctgtattccatacatattcttccttacctccattgtggagtaatagactgattgcatcttgatagtccaggtcaatcagcccagccaacactgtaactcccctcttagcctgtggacttaaaggtaggaggggcccaaagtggccaggtggaaatctttacttccagtttaatggaattgttgttgtttctcctgatggcagcattattcccactggaactaagacctctaggccaacagaatgtaatgtcatgggaccaggaagcaaaaattttgctagtggatcactaggggtgatggtgaatggtgccatttccacttccaccccttgattcctggatccatgaattatggctatgggagaaagagtaccatatattggatgctgatttggagcatacatggccttttggagagctttgccccagccctgcaaagtattggagcctagttgacattgtaattgtgactttgaaaggccattccattcttctatcaatccagctgcttcaggatgatggggaaaatggtaagacaagtgaatcccatgagcatgagcccactgccacacttctttagccgtaaagggagtgccttggtcagaggcaatgctatgtggaatactgtgacagtggataaggcattccatgactccacagatggtagtcttggcagaagcattgcatgcatatctgcagtaagtgtctatttcagtgaggacaaacctctgccctttccaggatggaagaggtccaatataatccaacctgccatcaggtagctcactgatcaccctgaggaatggtgtcatttgggtagagacccagagccaaaccagatcacgccacccaacccctcccaaatctcatgtcctctttgcatttcaaaaccaatcatgccttcccaacagtcccccaacatcttaactcatttcagtattaactcaaaagtccaaatccaaagtcacattggagacaaggcaagtccctttcatctatgaacctgtaaaatgaaaaacaagtcagttacttccaagacaaaatgggggtacaggcattagatacatgctcccatttcagttgggagaaatgagccagaataaaggggcttcaggtcacatgcaagcccaaactccagtggggcagtcattaaatcttaaagcttcaaaataatctcctttgactccattcctcacattcagggcatgcttatgcaaagtgggggctcctacaaccttgggaagctctcaccctgtggctttgcagctctgaccccatggctgctctcatgggctttgcagagttcagccctcctggctgctctcattgagtgcatgcagcttttccaggtgcacagtgcaagccgttaatggatctaccattctggggtctgaaagatggtggccctcttctcacagccccattagtcactgtctccagtggggactctgtgtgggggctccaaccccacatttcccttctgcactgccctagcagaggctctccatgaaggctttgcccctggcgcagacttctggctggacatccagtcatttctataaatcctctgagatctgggtggaggatcacaaagctgaactcttctcttccgcacatccctaggcccaacatcatgtagaagccaccaatgattggggctttctgaagcaatggcctgagctgtacattggacttttttagccacagctagacctggagcagctgggacacagggcaccaagtcccaaggctccaaagagaagctgggccctggacccagcccatgaaaacatttttccctgataggcctccaggcctgtgattggaagggctgctgcaaagatctccgacatgccctggaaacattttccccattgtcttgattattaatattcatctcttcattacttatgcaaatttctgcagccaacttgaatttctccctagcaaatgtgtttttctttactaccacatggccaggctgcaaattttccaaacttttatgctctgtttcccttttaaaaataagttcctatttcagatcatctctctcaagggcaaagttccacagatttctagggcagggacaaaattccatcaagcttggttttatacattttagagaggcatgagacatcaatcaaatacatttaagagacacattggtttggtccagaaaggtggaacaactcaaagctagggcttccaggctataggtgaatttaaatattttctggttgacaattggttgagtttgtctaaagacctgggatagatagaaaggtaatgttcaggttaagataaagattgtagagtccaaagttcttttgaagtcttatagtggctgcccttagagataataggtgacaaatgtttcctattcaaatcttagttgaactctttaggattgggaggttctagaagaaaaagatctagctatgttaatagagattctttacagatgcaaattttcccccacaaagaacagctttgcagggccctttctttctttctttctttctttctttctttctttctttctttctttctttctttctttcttttttagatggagttttgctcttgttgcccaggctagagtataatggcacgatcttgtctcaccacaacctccacctcctgggttcaagtaattctcctgcctcagtctcccgagtagctatgattacaggcatgcaccaccacacccggctaattctgtatttttagtagacacagggtttctccatgttggtgaggctggtctcgaactcccaacctcaggtgatccgcccacctcagcctcccaaagtgctgggattacaggcatgagccaccatgcccggcctgcagggccatctcagagtatggcaaagaaacatgttttggggtaaaatattttgattttcttatttgtctcataatgttatgccagagtcagtttggaaagtaaatcatgatatataggtttaaataaaacccatctgatgagaatttatgatttgtagagcatgcctccccagactctttagataggaatttgggcaagatgaaaaaaaaatcagagtttagtcctcactacctaagaccagctcagcttggacttcactgttcatgtcactatcagcattttagtcaaaaccactcaataagtctctaggaagttccaaactttcccacatcttcccttctcctttcaagttctccaaactgttccaaccgctgccaggaggtacccagttccaaagttgcttccagattttgagttatctttatagcagttccccactcctggtaccaatttactatattagtctgtttccacagtgctataaagaactgcccgaaagtggttaatttgtaaagaaaagaggtttaattgactcacagtgctgtgtggttagggtcggaggctcaggaaacttgcaatcatggtggaagtggaagcaggcatgtgacacatggcagcaggtgagagagagaaagagagagagagggaatgaaggaggaaccaccatacatggataaaaccatcagatctcatgagaactcactcactatcaggagaacatgaggacagcatgggggaaaccacccctatgacccagtcacctcccaccaggtccaccccttgacacataaggattactatttgagatgagatttgtttaatgacacagagccaaaccacatcagcatgtgacaaaggtctaatatcaagaatctatgagggggcagttccaaaatggctgaataggaacagctccagtctacagctcccagcatgagctacacagaagacaggtgatttctgcatttccaactgaggtactgggttcatctcacgggggcttgttggacagtgggggcaggacagtgggtgcagcccaccaagagtgagctgaagcagggcgaggcattgcctaacccaggaagtgcaaggggtcagggaattcccgttcctagccaagggaagcggtgatggacggcacctggaaaatccggtcactcccaccctaatactgcacttttccaacggtcttagcaaatggcacaccaggagattatatcctatgcctggcttggaggttcccatgcccacggaacctcgcttattgctagcacagcagtctgagatcaaactgcaaggtggcagtgaggctgggggaggggtgcccacaattgctgaggcttgagtaagtaaacaaagtggctgggaagctcaaactgggtggagtccactgcagctcaaggagacctgtctgcctctgtagactccacctctgggggcagggcatagctgaacaaaaggcagcagaaacctctgcagacttaaatgtccctgtctgacagctttgaagagagtagtgtttctcccacatggactttgagatctgagaatggacagactgcctcctcaagtgggtccctgacccccgagtagcctaactgggaggcaccctccagtaggggcagactgacaccttacacggctgggtgcccctctgagatgaagcttccagaggaattatcaggcagcaacatttgctgttcagcaatattcgctgttctgcagcctctgctgctgatacccaggaaaatagggtctgcagtagacctccagcaaactccaacagacctgcagctgagggtcctgactgtcagaaggaaaactaacaaacagaaaggacatccacatgaaaaccccatctgtacatcaccattatcaaagacaaaaggtagataaaaccacaaagatggggaaaaaacagggcagaaaagctgaaaattctaaaaatcaaagtgcctctccccctccaaaggaatgcagctcctcgccagcaatggaacaaagctggatggagaatgactttgatgagttgagagaaggtttcagatgatcaaacttctccgagctaaaggaggaagttggaacccattgcaaagaagctaaaaaccttgaaaaaagatcagatgagtagctaactagaataatcagtgtagagaagtccttaaatgacctgatggagctgaaaaccatggtatgagaactacgtgatgaatgcacaagcttcagtagccgattcgatcaactggaagaaagggtatcagtgattgaagatcaaatgaaagaaatgaagggagaagagaagtttagaggaaaaaaaagtaaaaagaaagaaacaaaccctccaagaaatatcagactatgtgaaaagaccaaatctatgtctgattggtgcacctgaaagtgacagggagaatggaaccaagttggaaaacaccctgcagtatattatccagcagaacttccccaacctagcaagacaggccaacattcaaattcaggaaatacagagaaccccacaaagatactcctcgagaagagcaactccaagacacataattgttagattcaccaaagttgaaatgaaggaaaaaatattaagggcagccagagagaaaggtcgggttaccctcaaagggaagcccatcagactaacagctgatctctcagcagaaactctacaagccagaagagagtgggggccaatattcaacattcttaaagaaaagaaatttcaacccagaatttcatatccatccaaactaagcttcataagtgaaggagaaataaaatcctttacagacaaacaaatgctgatagattttgtcatcaccaggcctgccctacaggagctcctgaaggaagcactaaacatggaaaggaacaactggtaccagccactgcaaaaacatgccaaatcataaagaccaccaaagcgaggaagaaactgcatcaactaacgagccaaataaccagctaacatcataatgacaggatcaaattcacacataacaatattaacctttaatgtaaatgggctaaatgctccaattaaaagacacagactggcaaattggataaagagtcaagacccatcagtgtgctgtattcaggagacccatctcacatgcagagacacacataggctcaaaataaaggcatggaggaagatctaccaagcaactggaaaacaaaaaaaggcaggagttgcaatcctagtctctgataaaagagactttaaaccaacaaagatcaaaagagacgaagaagaccattacataatggtaaagggatcaattcaacaagaagagctaactatcctaaatatatatgcatccaatacaggagcacccagattcataaagcaagtccttggagacctacaaagagacttagattcccacacaataataatgggagactttaacaccccactgtcaacattagacagatcaacgagacagaaagttaataaggatatccagcaactgaactcggctctgcaccaagcagacctaatagacatctacagaactctccaccccaaatcaacagaatatacattcttttcagcaccacaccacacctattccaaaattgaccacatagatggaagtaaagcactcctcagcaaatgtaaaagaacagaaattataacaaactgtctctcagagcacagtgcaatcaaactagaactcaggattaagaaactcactcaaaaccactcaactacatggaaactgaacaacctgctcctgaatgactactgggtacataatgaaacgaaggcagaaataaagatgttctttgaaaccagtgagaacaaagacacaacataccagaatctctgggacacattcaaagcagagtgtagagggaaatttatagcactaaatgcccacaagagaaagcaggaaaaatctaaaattgacaccctaacatcacaattaaaagagctagagaagcaagtgcaaacacattcaaaagccagcagaaggcaagacataactaagatcagagcagaactgaaggaaacagagacacaaaaaaacccttcaaaaaatcaatgaatccaggagctggttttttgaaaagatcaacaaaattgatagaccactagcaagactaataaagaagaaaagagagaagaatcaaatagatgcaataaaaaatgataaaggggatatcaccaccgatcccacagaaatacaaactaccatcagagaatactataaacacctctacggaaataaactagaaaatctagaagaaatggataaatttctcgacacatacaccatcccaagactaaaccaggaagaagttgaatctctgaatagaccaataacaggctctgaaattgaggcaataattaatagcttaacaaccaaaaaaagtccaggaacagatggattcacagccgaattctaccagagctacaaggaggagctggtaccattccttctgaaactattccaatctatagaaaaagagggaatcctccctaactcattttatgaggccagcatcatcctaataccaaagcctggcagagacacaacaaaaaaaaagagaattttaggccaataaccctgatgaacatcaatgcaaaaatcctcaataaaatactggcaaaccgaatccagcagcacatcaaaaagcttatccaccatgatcaagtgggcttcatccctgggatgcaagtctggttcaacatacgcaaatcaataaacgtaatccagcatataaacagaaccaacgacaaaaaacacatgattatctcaatagatgcagaaaaggcctttgacaaaattcaacaacacttcatgctaaaaactctcaataaattagatattgatgggacgtatctcaaaataataagagctatctatgacaaacccacagccaatatcatactgaatgggcaaaaactacaagcattccctttgaaagctggcacaagacagagacaccctctctcaccactcctattcaacatagtgttggaagttctggccagggcaatcaggcaggagaaggaaataaagggtattcaattaggaaaagaggaagtcaaattgtcgctgtttgcagatgacatgattgtatatctagaaaaccccatcgtctcagcccaaaatctccttaagctgataagcaacttcagcaaagtctcaagatacaaaatcaatgtgcaaaaatcacacgcatttctataacccaataacagacaaacagagagccaaatcatgagtgaactcccattcacaattgcttcaaagagaataaaataccttggaatccaacttacaagggacgtgaaggacctcttcaaggagaactacaaaccactgctcaatgaaataaaagaggatacaaacaaatggaaaaacattccatgctcatgggtaggaaggatcaatatcctgaaaatggccatactgcccaaggtaatttatagattcaatgacatccccatcaagctaccaatgactttcttcacagaattgggaaaaactgctttaaagttcatatggaaccaaaaaagagcctgcaatgtcaagtcaatcctaagccaaaagaacaaagctggaggcatcacgctacctgacttcaaactatactacgaggttacagtaaccaaaacagcatggtactggtaccaaaacagagatacagaccaatggaacagaacagagccctcagaaataatgccgcatatctacaactatctgatttttggcaaacctgacaaaaacaagaaatgggaaaacgattccctatttaataaatggtgctgggaaaactggctagccatatgtagaaagctgaaactggatcccttccttacacattatacaaaaattaattcaagaggattaaagacttaaatgttagacctaaaaccataaaaaccctagaagaaaacctaggcaataccattcaggacataggcatgggcaaggacttcatgtctaaaacaccaaaagcaatgacaacaaaagccaaaattgacaaatgggatctaattaaactaaagagcttctgcacagcaaaagaaactaccatcagagtaaacaggcaacctacagaatgggagaaaatttttgcaatctacttatctgacaaagggctaatatccagaatctacaatgaactcaaacaaatttacaagaaaaacaaacaaccccatcaaaaagtgggcaaaggatatgaatagacacttctcaaaagaagacatttatggagccaaaagacacatgaaaaaatgctcatcatcactagccatcagagaaatgcaaatcaaaaccacaatgagataccatctcacaccagttagaacggcgatcattaaaaagtcaggaaacaacaggtgctggagaggatgtggagaaataggaacacttttacactgttggtgggactgtaaactagttcaaccattgtggaagtcagtgtggcgattcctcagggatctagaactagaaataccatttgacccagccatcccattactgggtatatacccaaaggattataaaacatgctgctataaagacacatgcacacgtatgtttattgcggcactattcacaatagcaaagacttggaaccaacccatatgtccaacaatgatagactggattaagaaaatgtggcacatatacaccatggaatactctgcagccataaaaaaggatgagttcatgtcctttgtagggacatggatgaagctggaaaccatcattctcagcaaactatcacaaggacaaaaagacaaacactgcatgttctcattcataggtgggaattgaacaatgagaacacttggacacaggaaggggaacatcacacaccagggcctgttgtggggtggggggagtggggagggatagcattaggagatatacctaatgttaattgatgagtttatgggtgcagcacaccaacatggcacatatatacatatgtaacaaacctgcacgttgtgcacatgtaccctaaaacttaaagtataataaaaaaatttttaaaaaaagaaacacctgcttttttctgttttccatttgcttagtagatttttctccatccttttactttgagcctggggatgtcattgcatgtgagatgggtctcttgaagacagcatacatttgggtcttgcttctttctccaacttggcaattctctgccctttaattggggcatttagcccatttacattcaaggttaatattgatatgtgcatatttcatcctgttatcatgttgttagctgctcaatatgcagatttgattgtatagttgatttatagtggcaatcgttatgtacttaagtgtgtttttgtggtggccagtaacgttcttccattatcatatttagcaatcccttaagggcctcttgtaaggcaatctagtggtgatgaatacccttagcatttgcttgtctgaaaaggatcttatttctccttcacttgtgaagcttcatttggctagatatgaaattcttgcttggaatttcttttctttaagaatgctgaatataggcccccaatctcttctggattgtacagtttctgctgaaacctccattgttagcctcattgggttccctttgtatgtgacctgaaccttctttctagctgcctctaatattttttttcctttcaacctttaagagtctgatgtctgatggctatatgtcttagggatggttgtcatgtataatatcatgcagaggttatttgcatttcttgaatttgaatgttggcctctctggtgaggttggagaaattttcatggaggatagcctgaaatgtttttcaagtttctttttttctctttctcttcttaagggataccaatgtgtcatagatctggtctttttacataattgcacatttctctgaggttttatgccttcttttttattctttgttctttatttttgtctgactgagttaattcagagaatcagtttttaagctctgtgattctttcctcagcttggtctattctgctgttaatacttgtaattgtattctgaaattcttgaagtgagttttttagctctatcaaatcagtttggttctttcttaaaatggccatttcatctttcagcttctgtatcattttactttatttcttagctcccttggattgggtttcaacattctcctgaatctcagtgatcttctttcctgtgcatattctgaattctatgtctgtcatttcagccatttcagtcaggttaagaaccattgctgggaaaccagtgtgattatttggaggtaagaagacactctggattttagagttgcagagtttcttgcattaattctttctcatctttgtgggctgtttctttaatctttgaagtggctgtcctttggatgtttttgtcttttttgttgttttttggtgtgtgtttttgtttgtttgttcatttgtttgttttttgctcttatcttctttgatactcttgcaggtttgattgtggtataaagtggattcagttagctgtgtttcttgaaaatcttagagggtccaggctcacctcagcactcttgtggtgtgttctctgctctgggactgggcccctggctttattctctggccccttgagtttagaaacttgctgcattggaggggctgaggtgttcccagtccattggccacaacactatagtagggggtgccggccaaagcacttcattagagtggtggcagtgggatccattcttactcatgggtgccagcagttgtggagtcatggcagggtgcacatgcatctgctggggtgggggtactggcaggagcagagtggcagcatccctacataggttcctgctggcagtcacagcgcagtgaggtgcccgtgtgttggcagggacagggtggtggggcacacatgcacatgcttgctggtggtagagggagttgtgatctgctgtgcactcatgccagcaaagcagttgggaggtactatgggtggactggtgcacatcagcagaggctggcctgctggaggtctccaatggttaggcatggtctgctggcaaaggagctatgatgagggcccccaggaaacaccctggttgggcttccaaggctgtactgcaagcaggcacagccagcctggggccccaggagaggccagaaggcaaggaaattctcatttcagatgggccctgtcccatggacaagaccaccctgctttattcaggtcccatagtcactctaaggttaaaatctcctagaggaggttggtgagccttgggggatgggtgtcccctggctgtgctccactacagccattctcatgtcaaacactctgggctttacacagactggagtcctgcccctggcatctctctaagcagctgtcccttccagcacaagtgtccatgggggtcatggggtctcctgctgctaggattctggaggcccatggcaacagcaggccactcctcacctgttcaactcaacctttccccaggagttgctgggagccaggaatgagtcctggtgcttggcatccccatgcagggttcccatcttcctccaccttcagctcagcatctgtgtcctcccccgtctactctcaatccactctcaatgcctccccttcaaagatctgcttggaaagcacccgtcttcctgatgtctcactccctccatggcagatattcctcctggctgcatctagtcagccatcttgactcgcctccaaagtctttttaattaccacttcggttaaattagtaactatcattttacaatggcctgtgattctgttttgatcaaatattttgagccttttagcatctataacaaatgttctcaaaaatcaaaatcctaaatcaagtctctgccttagtcttatttctggggcttattaaggctataaaaattaatcaccataaggttgtacaagctttttacagcttccagtcaggctatgaactccagtatcaccacctccagcctgataattacatatattggaagaaaatcagttaaaggactccctctagacccttgaaagggtgtgagagacaacatggtttcgcctgccttcatgtgtcccagtccatccctgtggctgcctctgtccacctcagcttgcccactgtctttccttcccaactgtctgccctgctgacttctggcctcagtgacagatgcaaagacaaggcgacagccccacatagaccgtttaaccagtcccacatttgcataagctaaatggtcatgtcacagtctgttgcccaggctggtctcaaactcctgggctcaagtgatccacccaccttgacccccaaggtgctgggattacaggcttgagccacagtgcccagccaagaacccgtttttgagtgggcaccttggcacacacctgtaaacgcaacactttgggaggccaaggtgggagtgtggcttgaggccaggaggttgaggttgcagtgagctatgatggcaccacctcactccagcgtgggtggcagagtgagatcctttagaaaaaaaaaaaaaaaaaacttgttttctctgcagccgggctccgtgaccaaacacaaacacaaacttcccctccagagggtccaggaggggctgggctgcaggaggtgcttagggcctcttagggaatggtaagtgaccacccaacgcaggcactcagccccaggggcatatgcagagagagggtccaggaggagctgggctgcaggaggtgcttagggcctcttagggaatggtaagtgaccacccaacgcaggcactcagccccaggggcatatgcagagagagggtccaggaggagctgggctgcaggaggtgattagggcctcttagggaatggtaagtgaccatccaacgcaggcactcagccccaggggcatatgcagagagaggctgggaggacactttcagtgactggggttacaaaccccaaccataagacattgctggctctgtgagccgccacctccagaaatctcccacttagttcttagcacttatccactcttcccttttcctactctcaattcctggaggatgccctcctttctcaggctcagaccaacctaccagctccactctagacctgaacacatgactcctccctctgtctccacctggaaatctcatcagtgcctcacatttacactcctgaaaatcaggtcctgcctacccaccctcttgctccacctgattcctgccctgtttcagccagagaccttgcagtctcctttaactctcaaacccacccatgtcgtgtgagcatactgactgtgttctatgcaagaaagagcagtttcttggtggtcctgcggttttattagtccagaggcaaagcgttggcagagctggtttcttctgaaccctgggagggagattctgttttcatgccttttccagattctagaacccatattccttgctctgtgtccccttcttccatcttcaaaggccatcctctcatctctgtgtccatcatcacatcacccttcccctgactctggttctcctgcttccacttataagcacccttgtgattacatcatacccacccagacaatgcagggccatattctcccctctcgagattaatttaatcacatctacaaagttcctcgtgccatatgaggtcactaaaccacatgttctgggggtttgaatgtaaacatttgggggatgcattattcagccacccacaagcactgctccccactggccacacactatgcacagccgagatcatgcaagtgaggcacgttcatcaacagcagcttcagcaggaaactatatgctccactttcctgccatttgtatctggatttttttttcgctatcattgtagaaagagtggtattgtaaaattaaagatggattattttctttctagaacactttggcaatctatccaacattatttatccccttctgagtgtcaagtgtgaggtcattctttcattgagagctcaatgcctacaattatgataatgcatattgggtactttcacacatcagaaagttcttctttcttaaaatctgttcttgaattattcattcttctctagctttttgttgatctattttataattttagaaaaatcagaaagtaacttgaagtatctgtcatctctacaggtttacctccctctttgtggccttcagaatgtcatgacacgcttttcccttgctcatcacatggtttctatgtatgagacctcatcacaggagctgtggtcccccgggagcaggcatctgtggatggtgccttgctcctggctgctgggacctgtgtgctgccagtggcactccacgacagtgatttcccagctcagttttgcagctccagatggtgggtgagacactaggaccactttgtgaacagcgagggcttggggtttgcttttctaccatgtccagggctgctgttcatgagggaatgtttctaacctgacatcatggctgaagccaacttagaacctctctagccgtatggggagtaggtgagtgatacagatgttaattagctcagtggagccactcccctatgtagacatgttacaaaacattatgctgtacagaataaatataggtcatttttatgtgtcaatcaaaagagaaactaattatttaaaaaaaaaaaaaaaacctctctactcaagccgaaacctcagctccagtcccacaagtcacacaaggctgctcccgtcctgtgtatgttaaacctacctcagaaatgcaagggggcattcaggtttcattctcaattcaaatgccctttttaattttgtctattcctagcacctggcaacttccagctctttttttcggggctcattcattatttaaagcacgtataatttttcacccacattctaacacatgtagtactgtagagaatccttccctaggaggatctacagcattagaaaagaattaagaactccaatatttacaagaaggaaaaagcaaaaagagatcaaaaaatgggcaacttctagaaatagaaaaccctcatgagtatgatgataaatcgctggcacacatgtgaatagttacttgatgcttatagtgatgtctgggaaaataacatgaaatacttataatctgtttctcacacatgtaattcaaaagaatagagagaagatgatttgaaatattcttaagtttgtaggaaaaaagctacttccatatgcataattgcatgtattttgatactgccattattaagaactatctaagagggtccattaaaaataaaatttcttggctgggcacagtggctcatgcctgtatcccagcactttggaaggccgaggcaggtggctcacctgaggtcagaagttcaaaaccagcctggccaacatggtgaaacgctgtatctaccaaaaatacaaaaattagctgggcatggtggcatgcacctgtagtctgagctacttggggggctgaggcaggataatcgtttgaacccaagaggtgtaggttgcagtgagctaagatcataccaccgcactccagcctgacagacaaagcaagactctgtctcaaaaatattaaaataaaatttctcattcctattacagagtaatttaattcattaatgccctgccctgttacaaaactcatttgtaaaatactaattgtaattgtgaaaaaatggcaattgatactaattttaaattctaaaaacagggcacccatattaaagattattctgcagtaagagaattagctataacattttgtaataaggtggagaaaacattctccaacttacaatggttggtgagaagaaagtttccagcacggtagatggaccctaagagcccttgttgaaataataagacaaaaagatatacagagagatgagccagatgaagggagacagagagagagagagagagagagagagaggcacagaaatgagagatacaaagtgaaagagggcaacctgtggggtcatcagatatttgttttctgttttgtttattctaacataaaggcagtggtgggtcatcgatgtatttagagtttgcacaatcactgtggaacacagacagacacaggggaagaggagaaacacagggcggtggcttgcccttggactgttcttagttcctcaaaacgtaacagctttgcccaacctaagggaactttcagcagctgctcttctgccataggcctctttcctgccttgttttcatgtggctgactgtttctgttcctgcaggtcttagctcatcagacaggcatttattacctctgtgtcaacagtgggagcttccattactctctagcatgacactccccttcctcttttaggaaatttaacatggaagtgagtttgccatcggccttctccccacagtgttaacagtggtgaggaagccagcctgttccaccttgcccctcccatgattccaacactgagttcagacttgtcacatggaacttatctttgcatgtttgtggcacagacagatggacccaaccatggattagtggatggatggatggatggatggatggatggatggatggatggatggatagatggatggatggatggctgagtaggtgtgtggatggaagagtgaaaagatagatggatgcatgtatgggtggatgggtaggttgatggatgcatggatgggtggatggatgggtgagtggatgaatgggtgggtaggtgggtggctacatgcatggatgagtacttggatagataagtgagtggatggatggatggatggatgaatgggtatgtgaagggatggatgtattagagtgggtagttaggcaggcatgagctgatagtcaagtgattgttaaactgcctctctaaaataataattggtctcggctggacgcggtggctcatgtctgtaatcccaacactttgggaggctgaggtgggcggatcacaaggtcaagagattgagaccatcctgaccaacatggtgaaaccctgtctttactaaaaatacaaaaattagctgggcgtggtggcgtgcatctatagttccagctactcgggaggctgaggcaggagaattgcttgaacctgggaggaagaggctgcagtgagctgagattgtgccactgcactccagcctggtgacagagcaaagctctgtctcaaataataataataataataaataataattgatctcagccagcgccaagaaaaggcagtctcccaatagatagaaaacacccgaaactggtcatcagcagcttcctgataagatctcaggcattgggtgagtgggctcaagcatatgcactaagaggcaaagtggcagagtttaactggcacataatcttcctctaggaacactctaatagtaagagaaggacacctcaaatgagcatgtgcacatttcattaaacccactgtgtatgcagcccctcccaagtgctggcaggccactgtacatgtgggcagcccactccaagggaagaatcaagggagaagaaatacaaatcccagaaccatgtcaatgtataaaaccccaagtcaagggccggacagagcacttagatctctcaagtcgcccacttagccctcttccaagtgtactttacttcctttagttcccactttaaaactttaataaacatttactcctgctctaaaacttgcttgggtctctcactcttctgtatgccccttggccaaattctttcctccaaggaggcgagaatcaagttgctgcagacctgtatggattcgctcctgctaacagatagctggatgggtggacagatgcatgaattagtggatggacgtttggatgtgtgggtgggtgggtggattgtgggatggctggatgaatgcatggctggatgggtggacagatgcatgaattagtggatggatgtttggatgtgtgagtgggtgggtggattgtgggatggctggatgaatgcatggctggatgggtggacagatgcatgaattcgtggatggacgtttggatgtgtgggtgggtgggtggattgtgggatggctggatgaatgcatggctggatgggtggacagatgcatgaattcgtggatggacgtttggatgtgtgggtgggtgggtggattgtgggatggctggatgaatgcatggctggatgggtggacagatgcatgaattcgtggatggacgtttggatgtgtgggtgggtgggtggattgtgggatggctggatgaatgcatggctgggtgggtggatggatgcatggataagtggtggacggatggacgggtgagtggatgggtggatgtgtgtgtggatgggtggataggaaagccctctaattgattacagggctcagtgtgtgcttcaacatcatgatggcatcatcacattggtccctgtatgaagcagtgggggaggagagtgtaccaggggagcaggaatgacttttctccagaatcgacctctcccaccctgcagcctgggctgtgcaggccacattggagaaggtgcggtcgactactcctaaatgttgttgtgtccaatggcttgttgacgttgatgtaggaatgagcctacatctccaccatagatggaactgtttgggtccccaaagcagaaagcctcttctgttgcaggtgctgaagtttccatcttcttctgcttatacggaagctcacgcatcccttggatggcaggcgtcaggttcctgtgcgcactgagttccccccttacatgctttggacagaagtgtgagacacacaagattgctgcaggaagtccacctgtggggatgctgcgacttctccagcaagaacacgagtctgctcattgaccatcaccacacataacaaattaagtgtcccttttttgataacacgtcattgtttcacagagtattcttttaaagtgtataagttgactgcagttattattttttacttctgttactaatttactcataattaggcacaatttacacttaagaaatttcttaatagttttttcctccttaaggtgaactacagtcagataacatacttatcaattgtctctagctcttgtcagaaaaacatatagatgtgtgtgtgcgtgtgtcttggcctttccaatgatgaattaagatgtgcattgagaaggcattcactttatttgacgttaaggaagtaccaagaagacgctctccacagaccctgggaaagccagcagctgcaccccgaggctgtgccaggcagggaacaaggaggcagcaccacctgctgggcagggaaaatgtcctcccagtccctgccgcttctctgcagaggcacaaagagctgccccttctcctgggccttctcctgggctgatgagattgctccccgatatgccaaatcagggttgtgcatctgaggctctgtctagactctcagctccttcctactcctgcaaagtgaagaaaacaatgccaaggggtcctggaggcgtctctacccctggagagttttgactctcttcaatagtctccactaccctgccctcactccatgtcctccgtttctccctaaagcggtgcccagtctgattgcactgtggcagggataacgaggggccaggacatcaggggagagaagtttctacctgagtcacagcagcggctgccctgcagactcctgaagacacaagacacatttccatcccagagacccagcgaaatgcaacctcaggctagagacagccagttattttttcttgttctgtcctggagaggccactgagaaagtcgagccccttgttgaggaaaacatgagatctctgtgtgtcgtcctctgcctgatggctgtacctccatgtgagtgtctcagagatttcagaacgggggctgtgggctgtggtgtccgcttgtgactcatctctttgcttcttgtccctgagtgtcctgcatcagatgcagctactggagtcatgcccagggctggtgaggtcctcacagacctctgggcctggacccagcagccctctgggaaggcgctggggcacctcagctccaggggcagcacacacttcagcccagcctttctgggccaactctccatctgtagagacacatccaaggcccagttatccctgcagctgagctccgtgatggccaagggcagggccgcacattcccgtgggagacagaatggggacctcagcgtgagcccagacacaaacctccctgcagggaagcacaagaccaccaggcggcgctccagaccacacagcggccccagaagcaggttttagggggcggggcagacgtgtccgcgttgagtcaggtcattggttttactttccctgagcaaacggcctctgccaaggactcactgcacctctcaccttcacagttgttttttttttttttttaatcaccctgtagagttttgctagctaatttagatattgaggagtgcttcatacttccttgggcctctgcttgcagaaacatagcaattgtaaggaggcacgtgggaaagccccggctcggtgacccgggggatgctgctgtggccctggcaagagggcgtcgggccgcagtaacaaaggtgcagacggctctcagcctgcgcccgcggagtacaacacataagggctgtaacctaacgaaaaaagaatcgcagtgcaactgtcctgcatttgagtttgtgatcagttttgccctttgtctttaacaggttctaacataaaattttgaatgttggttcaagccctgtgggtaaaatgcacttacccacattccttaaacaaatagaacactgaggtggaaatgttttgaaaaagtagttttcagacatttggaaacaagcatcacaggatcataacccctgagaaaagaaaaacaaatgaacgaatcctgctattgcctgaaagcagctgccaggacacacggaaaggcttagtgagctgagcggacagagagcagagttcaaggcagcagcagcccgaggggaggagcaccggggagcaggctgctgtgcagccaggatgggccggggtggggcggggggagaacagctggagacttgccgcagggagggggatccctcaggtttggggctgagaactgacttatgcctgacttatgcctgcatgaaaagaaactactcgatatcagggggaaatcaccagaaacctgtggacccaaaactacacagagcctacacaaggaaagcattgtttgtgttctcccagccagggtggaaagaccttgagatatgtaaagcttcaagcaatcttccgaagtaatctcgtgagtagtggtgccacattaattcaggactaaaggctgctctgaactgaacctaagaaatgcttcaagtgtagcctggagcccgggtgcagtggctcacacctgtaatcccagcactgtgggaggccgaggcaggcggatcacttgaggtcaggactttgagaccagcctggccaacatggcaaaacctgtctctactaaaaacacaaaaattagctgggcgtggtggcagatgcctgtaatcacctcccacctggacccttccttgatacatcagaattacaactagagatgagattggggtggggacacagagccaaaccgtatcacataggaacctaaaaggataataaagtaggaaaacttcccacatcagtaaccctttatccgatagtaatcccaatctgcaaagtaaaactgtgtgattttactaagataacggaatcttctctacagaaggactttccagtgcaaaagctccccaccctcaccatgaaatgcacgtgaccatttccaatttgtgtaaagtcctcagttagtactgagacttcggaaggttagaaatccctttgctcatgctgcatggtccggatgagatgtaagaatcattagctaatagacatgcaacagcttttgtgtgaaagatgttatgagacatttaaggtatttgcttgtgattactaagcattcattgtatcattggagcacatgtgcttttataccctggagaaattccagtaattgaattgctgggttgaatgggattttgatttggattaaatttaaactatagattttatttagggaaaactggcatcttaattatgttattggggggcccttgctcccagagctcccaagatggtggcaggccgcttccaaaatgaccgcaggccacttccaagatggtggcaagcctcatgttctctgacctggggttcttggcctcacggattccaaggaatggaagcttgggccatgcagtgagtgttatagctctattagaagccgtgggtcacggaagagaaccgtggaacccagtgactagtgttcagctcgattaggacgaacccaggcacttagccgtgcaggaacaatggcgagcatttggcccgatcgagagtggcaatgggcgcctcgctggatcaggagcacagcggataccctgatggatccggagggatggaagccagcggtgggtctcccacgggggcaaacagcagtggtggacggtgagcgaaagcgaagctcgagccgtaacaaacatggaccagaagagtgcagttgcaagatttagtagagtgaagacagagctcccatacaaagggaggggacccaaagagggtagctgttaccggctcgaatgcctgggtttatatcccgatcattgtccctcccgctgtgctctcaggtgatagatgattggctatttctttacctcctgcttttgcctaattagcattttagtgagctctctttactatctgattggtcgggtgtgagctgagttgcaagccccgtgtttaaaggtggaagtggtcaccttcccagctgggcttagggattcttagtcggcctaggaaatccagctagtcctgtctctcaattacactgagttttccaatccatgcatccaatatgtggtgtatctcttcatatgttcatagcctctgagcaatgttttacaattttctgtgtaaagaactccacatcgttttatgtttcttctaaggtatatcctgattgctttttatgtcttcacaagttttttcctttcaaaattaattttccaattgtttggtgctaatatgctcaaatgtccttgattttcttagtttgaacagtccgtttttgttttggggatttatttttttttcagattctttaagattttctatgtctataaccatataatctctgaacagagacagttttgctttttcctttcaacttgaggtaggttttctgggtagttcaggacgcgcaggcactgggtgggtggtgttagcagctgcacgatgccttggagaggacactctcgggggactgtggccgctgctcagctgtgaccgttcttatagcaccagcagctgcggccaccattcttatccaatttccaaagccacaccacaggccctctcaagaacgaggcgtggaggctatgccctctcctggacacatcatcattcccaagccccacgatgtgggccccatgggacgcacacctttgtctgtccagacctcagccccacctcctcatcctgcaccagaactcttcagagcccagtgcatgaaatgggctaccaaggaaatgagggtaggttcctgagaggaaactggccctgcatttgggagctaggagtctgctaattcgcctggcagccctgtgcagccctccgtggctacagtccaccccgtgcccatcagtgcctccttcctgtgcaagcctggacctcgccctgggctcaggatgggctgtagaccgagaatgcaggcgggaaagtctttgtctatcggggccatagtcaggttctacagtgagtcagggaaagacctgtggaggtgtggatgaggacaatgggtccaccatcaacaggaggacacgggttcgaccccttgcagaggcacagtcccacatcactgggaggcagccacactcactgcctcgccctctcctcacacagtgcagtttccacgttcacagccccagccagtcaccaggaatgccctgggggcggcctttccccagtgcactccgagccctcccttggctgtgcggtgagctccatgcccaggagatatccacccatagtcctccggaaagcagctgacctgccatgccctggaaccacaaatccccacagatcagccagcctgcagtgggccttggatgtggtgaggagtggtggcacccccgttcccaccccacagatgcaacgcctgtgggtgacgcatgtgagtactgaggagtagagggtagaactgtaggccccgagaaccacagaaactcgggtgttacactctggggccatgtaaggagaaagtgtcactggacagaaacaggcccctcctagacactgtgtgcgccatagtcacctgtcattagctctcactcttgcagattcatgattgaggtggttaaaaaaaaaaaagctcctactcacccatccaaccccatcctggggtgtttccaccacccttggggtttgggatgagctgcccttgcccactgtgctctgtggacctccctttagaagctcacagctccctgcactcggctccatcctgccccaccacacagaagcaaaacccctctcctttccactgcaggcttttcctggaccagaatgctgacctgctgcccttcactcccgaagtggtgggactgcctggggtggtgtgggtgttgagccttcttactctagggacctggcacctggccccaggggcacagggatggtgcatctgcctagggatgcctcctcatgccagggggtgggggttagtaccatcggccctcaggatttgttgcatgaatgagtgaatgggtgaataaatgaaggggatctgatctatgaataagggtatatagactttggttgatgtaggacgccaaatgctggaatttcagagtcatcacacccaggggccctgcctctgagctcctctttgcatccaatctgctgaagaacatggctctagggaaacccagttgtagacctgagggccccggctcttcaatgagccatctccgtcccggggccttatatcagcaagtgacgcacacaggcaaatgccagggtgtggtttcctgtttaaatgtagcctcccccgctgcagaactgcagagcctgctgaattctggctgaccagggcagtcaccagagctccagacaatgtctgtctccttcctcatcttcctgcccgtgctgggcctcccatggggtcagtgtcagggagatgccgtattcacagcagcattcacagactgaggggtgtttcactttgctgtttccttttgtctccaggtgtcctgtcacaggtacagctgcagcagtcaggtccaggactggtgaagccctcgcagaccctctcactcacctgtgccatctccggggacagtgtctctagcaacagtgctgcttggaactggatcaggcagtccccatcgagaggccttgagtggctgggaaggacatactacaggtccaagtggtataatgattatgcagtatctgtgaaaagtcgaataaccatcaacccagacacatccaagaaccagttctccctgcagctgaactctgtgactcccgaggacacggctgtgtattactgtgcaagagacacagtgaggggaagtcagtgtgagcccagacacaaacctccctgcagggatgctcaggaccccagaaggcacccagcactaccagcgcagggcccagaccaggagcaggtgtggagttaagcaaaaatggaacttcttgctgtgtcttaaactgttgttgttttttttttttttttggctcagcaacagagatcatagaaaaccctttttcatatttttgaaatctgttcttagtctaatggagattctctaatatgtgacaatgtttttctcttgctgtttttggaattctttgtctttgacttttgacaacttgacttttgacagtgtgcctcaaagaagttctattttgggttctgtgaacctcctggatctgggaagttttcagctatgatttcattaaacgtgttttctacaccatttccctactcttttggaatacccataatgcaaatatttgttcacttaattgtgtcccataaatgctggggattttcttcattcctttttactctttttttctttttattcatctgcctgaattatttcaaaagatctgtcttcaacttcagaaactcttttgcttggcctagtctaatcttgaaggtctcaattgtacttttaatttcattcattgaattcttcaactctggaatttctgttggttcttttttatgatacttatctctttgttgaattcctcattcaaatgataaattgttttcctgatttcactgaattttctatctgtacactattgtatctccctgagtttcttagagattatccttttgaattatttttctgacattctgtatatttccttatgattggggtctgctactggagaatgactgttgtctttttcaggtgtcgtgtttcctggccttttcatgttttatgtgttcctacgttgatttctacacatctggcggaccagtcatcccttgcaatttaatggagtaggttttgcaggaaaagacttcctagtacagacgggtctcagggtgtcagtgtggcggggcgtgctggctttagttctaggttgacgcagtagcgtagtctccatgtcgtttcttcagctgccgtccacattggtgacgtttgcgagtgtctcagtggcctgggctgagaggtttgtggcagtggaagtgcaacgttgctagaggtggactcaccaggctgtttctgaggtcgaggcacatgcatgcacatggtggattgaccaacttggtgccaggctcactagggttggggacatggggctgtttctcaggcccaggatgcaaacacaagtctctttggctggcctgggggtgtggcttctgagggcaatccacagggctgtttctcaggttcaggacacaagtgcatggccgctcaactggcctgggcatgtgtctcccagggccaccccatgggctctttctcagacccaggacatggccacatggcttcctcagctggcctgggtgtgtgtctgctggggggctgcaggggcacagggttatttctcaggccggggtcatgggcgcacagctgcttgctggcttataggagtgcctgccaggggtggcccatgatgctgtttctcaggcctaatttcaggtgcagagcctttgggcaggtcaacggcatacctgtggaaattggagtggatgccacagggctatttctcaggtgcctgagtgtgggcacatatccactctgccagcctggagttagtatcaggtgctcggtggctcaggggcctctcctgctcaggggagggccctcagcagcttggccaaatcaatggtggattcaccctgggcaggcctggcaggctcttcctccagctggatgtgcagcagcaggggttgggttttttgctgtgcagggccagagtcacggccaatcctcagcctaggctctgcacagccagggttgtggcattcagccacccagatatgggcatcctgaagatggagccccaatgctagaaaggggcagtggctaccagcctcagggcaggatgcactccagaggcggctccggtctcaaggtggcgctgggctgcagcagctaggctcacagtggatgaatgggggcagggagtacacaccttgtgctcctaatctgggatcattcctggcagctcccaaccgcggatcctctccctatagtgagtcgtattagcggccggccgcctcccatgattccaacactgagttcagacttgtcacatggaacttatctttgcatgtttgtggcacagacagatggacccaaccatggattagtggatggatggatggatggatggatggatggatggatggatggatggatagatggatggatggatggctgagtaggtgtgtggatggaagagtgaaaagatagatggatgcatgtatgggtggatgggtaggttgatggatgcatggatgggtggatggatgggtgagtggatgaatgggtgggtaggtgggtggctacatgcatggatgagtacttggatagataagtgagtggatggatggatggatggatgaatgggtatgtgaagggatggatgtattagagtgggtagttaggcaggcatgagctgatagtcaagtgattgttaaactgcctctctaaaataataattggtctcggctggacgcggtggctcatgtctgtaatcccaacactttgggaggctgaggtgggcggatcacaaggtcaagagattgagaccatcctgaccaacatggtgaaaccctgtctttactaaaaatacaaaaattagctgggcgtggtggcgtgcatctatagttccagctactcgggaggctgaggcaggagaattgcttgaacctgggaggaagaggctgcagtgagctgagattgtgccactgcactccagcctggtgacagagcaaagctctgtctcaaataataataataataataaataataattgatctcagccagcgccaagaaaaggcagtctcccaatagatagaaaacacccgaaactggtcatcagcagcttcctgataagatctcaggcattgggtgagtgggctcaagcatatgcactaagaggcaaagtggcagagtttaactggcacataatcttcctctaggaacactctaatagtaagagaaggacacctcaaatgagcatgtgcacatttcattaaacccactgtgtatgcagcccctcccaagtgctggcaggccactgtacatgtgggcagcccactccaagggaagaatcaagggagaagaaatacaaatcccagaaccatgtcaatgtataaaaccccaagtcaagggccggacagagcacttagatctctcaagtcgcccacttagccctcttccaagtgtactttacttcctttagttcccactttaaaactttaataaacatttactcctgctctaaaacttgcttgggtctctcactcttctgtatgccccttggccaaattctttcctccaaggaggcgagaatcaagttgctgcagacctgtatggattcgctcctgctaacagatagctggatgggtggacagatgcatgaattagtggatggacgtttggatgtgtgggtgggtgggtggattgtgggatggctggatgaatgcatggctggatgggtggacagatgcatgaattagtggatggatgtttggatgtgtgagtgggtgggtggattgtgggatggctggatgaatgcatggctggatgggtggacagatgcatgaattcgtggatggacgtttggatgtgtgggtgggtgggtggattgtgggatggctggatgaatgcatggctggatgggtggacagatgcatgaattcgtggatggacgtttggatgtgtgggtgggtgggtggattgtgggatggctggatgaatgcatggctggatgggtggacagatgcatgaattcgtggatggacgtttggatgtgtgggtgggtgggtggattgtgggatggctggatgaatgcatggctgggtgggtggatggatgcatggataagtggtggacggatggacgggtgagtggatgggtggatgtgtgtgtggatgggtggataggaaagccctctaattgattacagggctcagtgtgtgcttcaacatcatgatggcatcatcacattggtccctgtatgaagcagtgggggaggagagtgtaccaggggagcaggaatgacttttctccagaatcgacctctcccaccctgcagcctgggctgtgcaggccacattggagaaggtgcggtcgactactcctaaatgttgttgtgtccaatggcttgttgacgttgatgtaggaatgagcctacatctccaccatagatggaactgtttgggtccccaaagcagaaagcctcttctgttgcaggtgctgaagtttccatcttcttctgcttatacggaagctcacgcatcccttggatggcaggcgtcaggttcctgtgcgcactgagttccccccttacatgctttggacagaagtgtgagacacacaagattgctgcaggaagtccacctgtggggatgctgcgacttctccagcaagaacacgagtctgctcattgaccatcaccacacataacaaattaagtgtcccttttttgataacacgtcattgtttcacagagtattcttttaaagtgtataagttgactgcagttattattttttacttctgttactaatttactcataattaggcacaatttacacttaagaaatttcttaatagttttttcctccttaaggtgaactacagtcagataacatacttatcaattgtctctagctcttgtcagaaaaacatatagatgtgtgtgtgcgtgtgtcttggcctttccaatgatgaattaagatgtgcattgagaaggcattcactttatttgacgttaaggaagtaccaagaagacgctctccacagaccctgggaaagccagcagctgcaccccgaggctgtgccaggcagggaacaaggaggcagcaccacctgctgggcagggaaaatgtcctcccagtccctgccgcttctctgcagaggcacaaagagctgccccttctcctgggccttctcctgggctgatgagattgctccccgatatgccaaatcagggttgtgcatctgaggctctgtctagactctcagctccttcctactcctgcaaagtgaagaaaacaatgccaaggggtcctggaggcgtctctacccctggagagttttgactctcttcaatagtctccactaccctgccctcactccatgtcctccgtttctccctaaagcggtgcccagtctgattgcactgtggcagggataacgaggggccaggacatcaggggagagaagtttctacctgagtcacagcagcggctgccctgcagactcctgaagacacaagacacatttccatcccagagacccagcgaaatgcaacctcaggctagagacagccagttattttttcttgttctgtcctggagaggccactgagaaagtcgagccccttgttgaggaaaacatgagatctctgtgtgtcgtcctctgcctgatggctgtacctccatgtgagtgtctcagagatttcagaacgggggctgtgggctgtggtgtccgcttgtgactcatctctttgcttcttgtccctgagtgtcctgcatcagatgcagctactggagtcatgcccagggctggtgaggtcctcacagacctctgggcctggacccagcagccctctgggaaggcgctggggcacctcagctccaggggcagcacacacttcagcccagcctttctgggccaactctccatctgtagagacacatccaaggcccagttatccctgcagctgagctccgtgatggccaagggcagggccgcacattcccgtgggagacagaatggggacctcagcgtgagcccagacacaaacctccctgcagggaagcacaagaccaccaggcggcgctccagaccacacagcggccccagaagcaggttttagggggcggggcagacgtgtccgcgttgagtcaggtcattggttttactttccctgagcaaacggcctctgccaaggactcactgcacctctcaccttcacagttgttttttttttttttttaatcaccctgtagagttttgctagctaatttagatattgaggagtgcttcatacttccttgggcctctgcttgcagaaacatagcaattgtaaggaggcacgtgggaaagccccggctcggtgacccgggggatgctgctgtggccctggcaagagggcgtcgggccgcagtaacaaaggtgcagacggctctcagcctgcgcccgcggagtacaacacataagggctgtaacctaacgaaaaaagaatcgcagtgcaactgtcctgcatttgagtttgtgatcagttttgccctttgtctttaacaggttctaacataaaattttgaatgttggttcaagccctgtgggtaaaatgcacttacccacattccttaaacaaatagaacactgaggtggaaatgttttgaaaaagtagttttcagacatttggaaacaagcatcacaggatcataacccctgagaaaagaaaaacaaatgaacgaatcctgctattgcctgaaagcagctgccaggacacacggaaaggcttagtgagctgagcggacagagagcagagttcaaggcagcagcagcccgaggggaggagcaccggggagcaggctgctgtgcagccaggatgggccggggtggggcggggggagaacagctggagacttgccgcagggagggggatccctcaggtttggggctgagaactgacttatgcctgacttatgcctgcatgaaaagaaactactcgatatcagggggaaatcaccagaaacctgtggacccaaaactacacagagcctacacaaggaaagcattgtttgtgttctcccagccagggtggaaagaccttgagatatgtaaagcttcaagcaatcttccgaagtaatctcgtgagtagtggtgccacattaattcaggactaaaggctgctctgaactgaacctaagaaatgcttcaagtgtagcctggagcccgggtgcagtggctcacacctgtaatcccagcactgtgggaggccgaggcaggcggatcacttgaggtcaggactttgagaccagcctggccaacatggcaaaacctgtctctactaaaaacacaaaaattagctgggcgtggtggcagatgcctgtaatcacctcccacctggacccttccttgatacatcagaattacaactagagatgagattggggtggggacacagagccaaaccgtatcacataggaacctaaaaggataataaagtaggaaaacttcccacatcagtaaccctttatccgatagtaatcccaatctgcaaagtaaaactgtgtgattttactaagataacggaatcttctctacagaaggactttccagtgcaaaagctccccaccctcaccatgaaatgcacgtgaccatttccaatttgtgtaaagtcctcagttagtactgagacttcggaaggttagaaatccctttgctcatgctgcatggtccggatgagatgtaagaatcattagctaatagacatgcaacagcttttgtgtgaaagatgttatgagacatttaaggtatttgcttgtgattactaagcattcattgtatcattggagcacatgtgcttttataccctggagaaattccagtaattgaattgctgggttgaatgggattttgatttggattaaatttaaactatagattttatttagggaaaactggcatcttaattatgttattggggggcccttgctcccagagctcccaagatggtggcaggccgcttccaaaatgaccgcaggccacttccaagatggtggcaagcctcatgttctctgacctggggttcttggcctcacggattccaaggaatggaagcttgggccatgcagtgagtgttatagctctattagaagccgtgggtcacggaagagaaccgtggaacccagtgactagtgttcagctcgattaggacgaacccaggcacttagccgtgcaggaacaatggcgagcatttggcccgatcgagagtggcaatgggcgcctcgctggatcaggagcacagcggataccctgatggatccggagggatggaagccagcggtgggtctcccacgggggcaaacagcagtggtggacggtgagcgaaagcgaagctcgagccgtaacaaacatggaccagaagagtgcagttgcaagatttagtagagtgaagacagagctcccatacaaagggaggggacccaaagagggtagctgttaccggctcgaatgcctgggtttatatcccgatcattgtccctcccgctgtgctctcaggtgatagatgattggctatttctttacctcctgcttttgcctaattagcattttagtgagctctctttactatctgattggtcgggtgtgagctgagttgcaagccccgtgtttaaaggtggaagtggtcaccttcccagctgggcttagggattcttagtcggcctaggaaatccagctagtcctgtctctcaattacactgagttttccaatccatgcatccaatatgtggtgtatctcttcatatgttcatagcctctgagcaatgttttacaattttctgtgtaaagaactccacatcgttttatgtttcttctaaggtatatcctgattgctttttatgtcttcacaagttttttcctttcaaaattaattttccaattgtttggtgctaatatgctcaaatgtccttgattttcttagtttgaacagtccgtttttgttttggggatttatttttttttcagattctttaagattttctatgtctataaccatataatctctgaacagagacagttttgctttttcctttcaacttgaggtaggttttctgggtagttcaggacgcgcaggcactgggtgggtggtgttagcagctgcacgatgccttggagaggacactctcgggggactgtggccgctgctcagctgtgaccgttcttatagcaccagcagctgcggccaccattcttatccaatttccaaagccacaccacaggccctctcaagaacgaggcgtggaggctatgccctctcctggacacatcatcattcccaagccccacgatgtgggccccatgggacgcacacctttgtctgtccagacctcagccccacctcctcatcctgcaccagaactcttcagagcccagtgcatgaaatgggctaccaaggaaatgagggtaggttcctgagaggaaactggccctgcatttgggagctaggagtctgctaattcgcctggcagccctgtgcagccctccgtggctacagtccaccccgtgcccatcagtgcctccttcctgtgcaagcctggacctcgccctgggctcaggatgggctgtagaccgagaatgcaggcgggaaagtctttgtctatcggggccatagtcaggttctacagtgagtcagggaaagacctgtggaggtgtggatgaggacaatgggtccaccatcaacaggaggacacgggttcgaccccttgcagaggcacagtcccacatcactgggaggcagccacactcactgcctcgccctctcctcacacagtgcagtttccacgttcacagccccagccagtcaccaggaatgccctgggggcggcctttccccagtgcactccgagccctcccttggctgtgcggtgagctccatgcccaggagatatccacccatagtcctccggaaagcagctgacctgccatgccctggaaccacaaatccccacagatcagccagcctgcagtgggccttggatgtggtgaggagtggtggcacccccgttcccaccccacagatgcaacgcctgtgggtgacgcatgtgagtactgaggagtagagggtagaactgtaggccccgagaaccacagaaactcgggtgttacactctggggccatgtaaggagaaagtgtcactggacagaaacaggcccctcctagacactgtgtgcgccatagtcacctgtcattagctctcactcttgcagattcatgattgaggtggttaaaaaaaaaaaagctcctactcacccatccaaccccatcctggggtgtttccaccacccttggggtttgggatgagctgcccttgcccactgtgctctgtggacctccctttagaagctcacagctccctgcactcggctccatcctgccccaccacacagaagcaaaacccctctcctttccactgcaggcttttcctggaccagaatgctgacctgctgcccttcactcccgaagtggtgggactgcctggggtggtgtgggtgttgagccttcttactctagggacctggcacctggccccaggggcacagggatggtgcatctgcctagggatgcctcctcatgccagggggtgggggttagtaccatcggccctcaggatttgttgcatgaatgagtgaatgggtgaataaatgaaggggatctgatctatgaataagggtatatagactttggttgatgtaggacgccaaatgctggaatttcagagtcatcacacccaggggccctgcctctgagctcctctttgcatccaatctgctgaagaacatggctctagggaaacccagttgtagacctgagggccccggctcttcaatgagccatctccgtcccggggccttatatcagcaagtgacgcacacaggcaaatgccagggtgtggtttcctgtttaaatgtagcctcccccgctgcagaactgcagagcctgctgaattctggctgaccagggcagtcaccagagctccagacaatgtctgtctccttcctcatcttcctgcccgtgctgggcctcccatggggtcagtgtcagggagatgccgtattcacagcagcattcacagactgaggggtgtttcactttgctgtttccttttgtctccaggtgtcctgtcacaggtacagctgcagcagtcaggtccaggactggtgaagccctcgcagaccctctcactcacctgtgccatctccggggacagtgtctctagcaacagtgctgcttggaactggatcaggcagtccccatcgagaggccttgagtggctgggaaggacatactacaggtccaagtggtataatgattatgcagtatctgtgaaaagtcgaataaccatcaacccagacacatccaagaaccagttctccctgcagctgaactctgtgactcccgaggacacggctgtgtattactgtgcaagagacacagtgaggggaagtcagtgtgagcccagacacaaacctccctgcagggatgctcaggaccccagaaggcacccagcactaccagcgcagggcccagaccaggagcaggtgtggagttaagcaaaaatggaacttcttgctgtgtcttaaactgttgttgttttttttttttttttggctcagcaacagagatcatagaaaaccctttttcatatttttgaaatctgttcttagtctaatggagattctctaatatgtgacaatgtttttctcttgctgtttttggaattctttgtctttgacttttgacaacttgacttttgacagtgtgcctcaaagaagttctattttgggttctgtgaacctcctggatctgggaagttttcagctatgatttcattaaacgtgttttctacaccatttccctactcttttggaatacccataatgcaaatatttgttcacttaattgtgtcccataaatgctggggattttcttcattcctttttactctttttttctttttattcatctgcctgaattatttcaaaagatctgtcttcaacttcagaaactcttttgcttggcctagtctaatcttgaaggtctcaattgtacttttaatttcattcattgaattcttcaactctggaatttctgttggttcttttttatgatacttatctctttgttgaattcctcattcaaatgataaattgttttcctgatttcactgaattttctatctgtacactattgtatctccctgagtttcttagagattatccttttgaattatttttctgacattctgtatatttccttatgattggggtctgctactggagaatgactgttgtctttttcaggtgtcgtgtttcctggccttttcatgttttatgtgttcctacgttgatttctacacatctggcggaccagtcatcccttgcaatttaatggagtaggttttgcaggaaaagacttcctagtacagacgggtctcagggtgtcagtgtggcggggcgtgctggctttagttctaggttgacgcagtagcgtagtctccatgtcgtttcttcagctgccgtccacattggtgacgtttgcgagtgtctcagtggcctgggctgagaggtttgtggcagtggaagtgcaacgttgctagaggtggactcaccaggctgtttctgaggtcgaggcacatgcatgcacatggtggattgaccaacttggtgccaggctcactagggttggggacatggggctgtttctcaggcccaggatgcaaacacaagtctctttggctggcctgggggtgtggcttctgagggcaatccacagggctgtttctcaggttcaggacacaagtgcatggccgctcaactggcctgggcatgtgtctcccagggccaccccatgggctctttctcagacccaggacatggccacatggcttcctcagctggcctgggtgtgtgtctgctggggggctgcaggggcacagggttatttctcaggccggggtcatgggcgcacagctgcttgctggcttataggagtgcctgccaggggtggcccatgatgctgtttctcaggcctaatttcaggtgcagagcctttgggcaggtcaacggcatacctgtggaaattggagtggatgccacagggctatttctcaggtgcctgagtgtgggcacatatccactctgccagcctggagttagtatcaggtgctcggtggctcaggggcctctcctgctcaggggagggccctcagcagcttggccaaatcaatggtggattcaccctgggcaggcctggcaggctcttcctccagctggatgtgcagcagcaggggttgggttttttgctgtgcagggccagagtcacggccaatcctcagcctaggctctgcacagccagggttgtggcattcagccacccagatatgggcatcctgaagatggagccccaatgctagaaaggggcagtggctaccagcctcagggcaggatgcactccagaggcggctccggtctcaaggtggcgctgggctgcagcagctaggctcacagtggatgaatgggggcagggagtacacaccttgtgctcctaatctgggatcattcctggcagctcccaaacttggctgagggcttgcaaaacctgtggaattctcctgttgcaagggctgtagatgtttgcagtggcagtgggtgctggcgggaaatctgcttaccttttccctacatgggaagtccctcctgtgtccagaccaatccgatctgggtggggaagacaaggctgcaaaggccaggtgcctccatgctgccctccgatcaccacgggtgcgtttccacacctccactgcactccgtcagtctcccttcaacactccagtcaaaccttagctgtttcttctttgccttattccttcctcatggggagggtgtgggtgaacaccaggcttctctaagttcttcatccatcttgctgatgtcattctccatccaggcatgggtttttaagaagtagtgaatactgaaatttcagcagaggacacctctataaaaattctgcaactggaaaacctccttaaattggctgattgtcattacaattggaggaaaactgccaataatttcaaatttagaaggctgagactctataaacaaagactaacaatatgttttctgatatttttccccaaaataatacttttccaagacgaaaatttttccagggtatataagcacatgtgctccaatgatacaacaaatacttactaatcataagcaaataccttaaatgtcttataacatctttcacacaaaagctgttgcatgtctattagctaaaaattcttatgtctcgtccagatcatgcagcatgagcaaagggatttttgaccttcaaaagtctcagtactaactgaggactttacacaaattggaaatggtcacctgcatttcatggtggtggtggggagcttttgcactggaaaatccttctgtagagaagattccattatcttggtaaaattacatagttttattttgcagattgggattaccaactgataaagggttactgatgtggaagttttcctactttattctcctattaggttcctatgtgatatggtttggctctgtgtccccaccccaatctcatctccaattgtaattcccatgtgtccagggagggtccaggtgggagtgattagatcaagggtggtttttcccaggctgttttcatgatagggtgttatcatgagatatgatggtttaaaagtggcaggttcccctgctctctctctcgcctgctgccacataagacgtgccttgctttcccttcaccttctgccatgattgtaagtttcctgaggcctccccagccatgcggaactatgagtcaattaaacctcctctctttataaattacccagtctcaggtagtatctttatagcggtgtgaaaatggactaatacactatggctttgaattaataatttaaaatttgtcagcttggcaataaaacatcctgttgacatttattttttaggtaatattttaaattggcagtttcattcatgtttttacaaattcttattttcagggtgtttaaggcctttgctttgaacttggtggttccttacactccatgctgttagtgaagagggaccaggttgggaggcattggtttgggtggtggtcaggaagggcagagtgatttgagtagggtctgagtggataatagctcatcagtttggaatttataaatgaccagggatgatttaaggagattcctgccagacacctatgccatggccatgccctatctggatctccagccgtgagatgagaacccagccatgcgggggagtctgttcgttctgctcaatgttgtaagtggcacatgctattggataatgtagaattgaatggatatcattttattattataatttacaaacttcctacaataaacttatcacctttatacatagaaacaaatataagtacattttccctcccctatgtcattttgagccctctctccaaaccatcctcccactctgcgactcactgtcctgcatttggctatgctctggcaagtcctgcttagacaagcactcaccagaccacctactcagcctcccttcagcgcccacctggcccacctgctcaaatacatgttgagtggtcacacacatggactgaacaccatctattccatgcactgccccagtgaccgcactgagcagcaagagagaaatgatcgcattagctatcaattatgccaattcaaatgctggagtctttctcagatacttttcaatgttcaagaattgttgattgtgaattctatacccaatgaaactatccttcagaaatgagcagaaaatggataccttctcaaataaacaaaaactaaaagaattcttgctacaagatgtactcttaaagactggctaaaggaagttcttcaaacagcaaggaaattgaattgatcttatgtcctgcacacttgctaaatttcctctcaattttagcagcactgtttagattccataggattttccatacaaacagtcatgtggtctatatatagagacagattttcctcttttccagtggggataaatttatgtctttttctttctgtgttacagcaggtaggacctccagtacaatgttaaacagaagtggtgaaaacagacattcttgcctgtttcctaacgttggagtttggtcttttactatggtgtcagatgttagctgtagggtttttataaatgcccttcatcacattgaggaagtttgctcctatgcctaattttctgagagtcttttaatgtgacactcatgctagaatttattaaatgctttctgtctactaagatgattatgcagttcttatattaacatgaataattacatttatttattctttaatatcaaggcaattttgcattcctgagacaaaccccatttagtcatcatgtgttgttattgttacatattgttggattcaatttcctcaaaatttgttaagaattgttacatctatgtttacaaggaagattagtctgtagggtattttttcttataataactttgcctagttttgcaatcagggtaatgctggactcacagaatgagttgggaagctatttcctcctcttcatttttctgaaagaatttgtataaaattggaattatatcttccttaaaggtttgcaagatttcataatgaagtcattggcctagagttttctttgtgggaaagtctttgtttgtttgttttgtggtttgggtttttttttaagagacacagtctcactctgttgcccaggctggaatgcagtggtgtaatcatagctcacagcagcctcaacctcctgggctcaagcaatcctcctacctcagccttcagagtagctgggactacgggcatgtaccaccacacccagctgtttgtttgtttgtttatcgctttgtcttgtttttgaggtcttattatgttgcccaggctggtcttgaactcctggcctcaagtaatcctcatgcctcagcctcccacagtgctggaattacaggcatgagccactgcacacagactgtgggaaagtttttaactaaaaattcaattttctcttccttttccagtgagctttccagtgtctttcaattaatgtatctattttatctaagttgttgaatttattgtcaaaatttttttaaacaatattcctctcttagaggttgaacatctgtagaatctgtagtgatggcacctcttaaatccctgatcttgctcatctgtgtcgtctctctttctctaatcagtatgcctaaagtttaatttcattgattttcttaaaaaactggttttggttttattgatttttttccctagttttttgtgttacatttcattgacttctgctctgatatttactatttcctttctactgcctacagtaagtttaatttgctattttcttagtttcctaaagtggaagctaagtttattgacttgaggcctttcctctgtctggatgcggatatttgctgctaaacatttccctccaacaccatgctgtgagttttagttacagcgggcttggagttggcctgagaaattctacttaaacagctgcacctatcatgtaagtgataaatgatgtacctgcctggccctcacccctggtcaaagaatgggatgtactaatgagcaatgttgctgcgtagctgtggatttcaaggtattttctgtgtggttttatcatcagcattgtttgttgatgactgcaagactgatgatttgcacctggcctcggtgagatccccgaaagaccctgcagatgggctggttacttagcagaaaatatgacaacgtggccagcaggaaacaggaaggtacaatcggctgcaggtgagctgttggaagtaagttccaattttcctattttgtatttgcattttaatagtgagactgcgcttatgttatttgtgtgaaacagctttattcatagcactgtaatttaaagagaaaacccattcatgggaacaacaaacgacctagacaccaaggtagctcatgccatccaaggctatactgtgcagtgattgggaaaatgggcactggtcccagaagtctgatcgacactctgccactggctagtcccgtgctggggggcgaggatccacactctgccactggttagtcccatgctggggacaagtatccacactctgccactggctagtcccgtgctggggggcgaggatccacactctgccactggttagtcccatgctggggacaagtatccacactctgccactggctagtcccgtgctggggggcaaggatccacactctgccactgattagtgttgtgaagatttaaataaagaacccacaccatattctttgacttgtgctttccgtatactgagagatagtaagagtacattattattatttataaagtaaactagaaagcacatgggaagacaagaagaaaacctgaataaacatgaattaccccattttcctcaggagaaaactttcacactctgaaggtacacaaattagcctacaaatttaatgtaaagcaaatagactgttgtaggtaccaattctcaatgtcacagtgttacatggaaagtaaaatacacaagaacagcccaaaagatggaaacaatggacgtggtcaaatgacatcagtacaacatccatatggtcctaagtagccatctttaaaatgggttagaaatgccttcaatcattcacacagacacatgcattgaacaaactctaagaagtgttcttacacgggaaaagcaagttacagatgcatgggcatgatatggatgtagatgtgtgtatgtgcatcccactcatacacaaaatacccagcatcgcccacatgcctgctgtgtgcgtaagtgtgagcgagtgcacagacaacagcgtgcagaaattcaaaccaagctgtgggtacttgttaccactgggaagggagtcggtcacagagggaaagagaaacaggacatcagcctttgacttcagaactgttcctgccttttcacatcctgtgctgttttcagcatcatcggagcccttaacacacatcacgggagtaagagtgtgttagagggagcattcggtgggacagatattgccatggcttgtggatagagttcacagtccttaataatccccgagatggcagccaagagctacgttctcaatcacgcagcttcaccccagaaactgacagaaacccaacaaccaaaaggtgtccattctgacagcctcagcctgtgctggctcagatgagcaaaaatgtacagatattaataatgatgttgatttgaagagcacagaggggggtatgcatgataagggtccaaatttttaccttaaaaaagaatacatttacttctcaatcacctacataacgatcattttttaaaaaactgatcaaatttggtgttacaagggcacgttgcaaattcttctggctacttttctctgactattctaattacgttaccgtgttttctcctgtatgtgcccgttcatgtgaatgtcatttctggctacttttctctgactattctaattacgttaccgtgttttctcctgtatgtgcccgttcatgtgaatgtcatttctggctacttttctctgactattctaattacattaccgtgttttcctgtatgtgcccgttcatgtgaatgtcatttctggctacttttctctgactattctaattacgttaccatggtttctcctatatgtgcccgttcatgtgaatgtcatttctggctacttttctctgactattctaattacgttaccgtgttttctcctgtatgtgcccgttcatgtgaatgtcatttctggctacttttctctgactattctaattacattaccgtgttttcctgtatgtgcccgttcatgtgaatgtcatccaggcagatttcccaaatccggcttcctgtaaccaagggctgaaagagggaacggtttcctgggaatcctttttgcagtttattttacccggaggcagaagcccacggttccgtgaagagtctattgctctcccctctctccttttgtgtctctatttttaattgacaaaaaagcaaatgtgaagattcctggggtacaatgcaaagtgacaatgcctgtctatattgtgggatgattaaaacaaggtaagtggcatatccatcacctcacacacttatcattttgtggtgagaacatttaaaatctcatcttttagcaattttgaaatagtcattattgttaactatagtcaccatgctgtgcaacagatcaaaagaactgactcctcccatcagcagaaacttcatgccctttgaccagcatctctcctttccccgtccacgactaacccccagcccaagagaacagccaacacccacctcgctgctgccacacgacatgtcgggctttgatgggatggaggtgagggtggggaagacaattccaaagctggagcactggcctcacagctcagacactcttctacttatcctgagagaatgatgtgctgagaccaactaaacctcccctgctcttcccacatggcagaaaagaggcaacccagggaagccattgccaggacatcatggtcacccaacccttgtgcagaaaggaagcacctgcccaggatgccatagcacccaaccctcatccccaaggaaacacagcccagggcaccatggacacccaaccgtcatccccaggggaggacacagcccagggcaccatggacacccaaccctcatccccaggggaggacacagcccagggtatcttggacacccagccctcattcctaggggagtacacagcccagggcatcttggacatccaaccctcatccccagggaaggacacagcccagggcatcttggacacccaaccctcattcccataagagcacacagcccagggcatcgtggaggcccgaccctcatccctaggggaggacacagcccagggcaccatggacacccaaccctcatccccaggggaagacacaacccaggccaccattaacacccaatcatgtgcagggagggtgtccttggagcctgggactcttgccagtgaagcggtggacaagaaactgaggatgcgatcagcacacagaaatctcaggcagcctaggatacatgaggcctctcacccctgggaacactgagcagccaccaggagcccacaccttgaggtacagcaggagccatgcgctcttgctcttgctcactcacactcctgcacacagccactgacacacgccctcgtgcacgttgcagattaactccactggccttgcacttgcaacgctggaggctgagaggtatccccaggttcttttctcgtgagaggggcaggctgactttcactctcctccatgtgctagaggcagctccaccaacactggctgccctgagtggatgcacctggctctggaattcctgtcatttgctttggatccaggagcccctgcctcatgtagctacttaacagaaaggaggaatccacccaggacatgcccagacgggagcctcacaggatggacagtggtgtctggggtcacgggcagccctgacccagcagcgccagcaccagcacacccagtggggaaggcggggaggcccaaacgccacccacagtttgttactccactgggtgggacccggcacccctgccttcctgacaccctggagtccctgcctcctcctagagcccccaagcccatctgcctcagagcatccagagacagacctggggagccatttcctcaggccctggacaaggaaacagggaattccaggttatgggtgcctggggcaggtctcaggcaggtgctgggaaccagagagaggggtcaccgcgaggcctcaggcctggcaccagcactttgagcctcagtttaccagcccacgaggtgctgagtctggactggatgaccttcccacccccagtgacctctgccctttcccgagcatgtcagctctgctccagcatcctggtgtgagcgcaatgccactttttttctcaacaaatacgaaaggaggaaggtgcccccagggccctgtgccctgaggatgcctgtgtggaggggtccatttcatcactggtgtcactcacaggaagggacgaagccacctgccttgacggagcttactccacctccgccgaaggccggggaggtccctcacagagaacctgaggcccagcaggctgcagaggtgctggcatggaatgactgctcagacgcccggggccggcagagaggacggatgtgggggaggtgcacactgaggagcctctccttggaggtggagacacgtgcaccacatggaccaggacacagtccacgaagcctcgcatccccctgagctgcagctcaagggcctctctctgagcccagagtcccacccctgggaggcagctgccccagctctgagggaggagggcatccaccaggccctccatctcctgggggcaccagcccagcccagaggctctgcaggactctgcacctccaattcatggccaggactttctggatgtatcttaaggactgaggactccacatcagggaccacacaagaccggggtcccggacacgggggttgggggtgagcatgtcaccgggatgggctgtggcgtcactctggtacttcatccggacagccagggaccaaagccacgccctcagccccaccccacccctgcctcacatggcaacgcagggtctgcagatgcaggagagtgagaagcatggtagccaggcagactagaggacccgagctggggttgagcacctccctgtctacccagggcatggcctgtgagactgcaggtggcctagtgtgtgctgcaggctcaaggtcctgccccagggagcatgacattcaggcccagaaattgcatcgtgctgcacacagtccaaggggataaccctgtgaagttcaggtcaccagcaggcttggggtcaagaccgagctgcagaggacaggtttctggaaggcacagcatcatgggtggagggacttggagcaaggtccttagccccgggaccagtgaatgtgtgcccttatagggaaagggggtctgtgcagaagcaagttagctgaaaatcatgaagtggagaggctcccctggattaaaggggtgagccctaatgtaatcacaagtgtccttctaggaggttggcagagggagactgacatagacagaagccaggtgaggtgggaagcggaggcagaggccgagagagcagacgctacgccctggccctgaagacggaggaggagccgagagctcagggatggagagactggaggaggcagggaagttctccccgcaagcctggagggagcatggcctccagcacccccagaccttggccctgcaggattcatctggacctgtggtataaatggtgtttaagccactgggctgtgcaaattgtcatagcagccatggcgcattcctagagggagccctggtggggacccagcaggcagcgacggggccctcacaagcctgtgagccactcagagccgcgagagtggctaggcttggtgaggtgcaggccacgcgcacctccactaaggcagccttagggcccacacatcctctctctctctctctctctctctctctatctctctccctccctccttccctccctcccgctctcttggttggacagctctccatcatccccctggacacgaccacctcccaaggccgagctggggcgctttgctcgaggtgagcactgacatcctgggggtgtgaggggcacctgcccagcggccccgtgtgcaggatgggcggtgggccctagctggcactgggcatatggcccggctggtgcctgcaggctgcagcttttctggggtggctgggatcagtgaaggcctccagagtctgggcctgggatccctgcagtgctggctgaggacaggcggggctgggcagtgagggcactgggtcactatcaccacccacggtttattacttcactaggtgggacctggcacccctgccttcctgacaccctggaatccctgcctcctcctacagcccccaagcccatctccctcagagcctccagagacagacctggggaggcatttcttctgcccccagcagaagcccgggaggccgggaaggcacagtgggtctaaaggagaggatcccaggactgcctgaggggtgactccgacgaggcaagcatagagcccactgagaagcggggtgggagccccaccagggatgggctagttcctcatgaaggaccaggacccaggaaggacaagggggcctgctggggcagggtctgctatgccggagtccctgtgagcctggcccagacctgcctctctctttcctcattggtccccacaggtccgtggtggttgccgtatcgggaggccccatggtggcaggggtgggacacctggtatacgtcgccaggtgtgtccaataggctcatgctcacaccttctcctggcacctgggcaaagcctgagcacccaggcactgaagtgagggcaaggcctcggggccccacaggatggccgaggagacagctgcagggcgcctgggacccctgggctcaggaggtagaaggatacagcctgaaaacccacaccacaagctcaccggccagtgcaggcccacagagctcgaggaggcagccctgagcctcccagggagagatgctctgtgcacgccggcacaggccctgggttacaaaccctaggcacagcccaggagaggcccaggccccagtccagcaaggggttgcaggaagcaagaggtccccggccacagcatgagataagcccatcaagccagggccaggtgggcaatgggaggcaggcagggcttgggggtgagtccctgctgcagcgccgtccactgtcgaccggaggagtttcttccctgtgcggagtccacgggcctcctgtgagtgtgtgcatgggcacaagtgtgtgtgtggctctgctgtgtgtctgtacacacgtatgttttgggtttttttgtgtctcagaccacagagtctgcccctcccaccaaagcccaggcagaaggatgaacccacgcccctggggcccaggcctcagcagcctctgcaggatcattgttcccagttgtcacttgcctttgccacagccctatttctccacaattccttaaagtcctcaacatgcatttaaggcacaaaggtgaaactgcccagaaacatctgactccgccgtggaacccaggagcaagctgggttagctaaggagcggggccgttggcagaggctggggatccaggctgaactttggaggaggcatgtgccagcatgggctcctgactatgtcctcctgggacaaacccaaacccactctttgaatatgggagggactttgctggccccggccctgaccgcagcacttggaaactgaggagtggtcgcctcctccgtgtcacagctgcccgttcaccatcatagaagcaactctgtcacctccatgggcccctctgtggctgctgcctgggtccaagctgagcccagctgcccaggcccagaaggaaagcccaggccaggtgcccagcacagaggcagtcacataccccggggagagccacagcaagcagccaatgttgcccaggagaggagtagctgacaaggtagaacgtgagctgccatcggctcgagaggctttgctggtcctcctggggctctggacatgaccaggaggagcgagggaagaagtcgcatggtggtcccatcctgggtggggcctgatggcagctggccacccgtcccagagtggcagccagatgccagcgccattcccacagtcacatcattggtcacagaatgcaggacatagagtgtcttctttccatcacagtgctgtccagacccatagcctagggtagacctggaagattcaatgtccacacccggggctggagcgtagccatgagccacgccccctgcccgtgcatggaaagccagcccaagctctgctccatccctagccaaagtcagtgtcctttccccttctcccaagtgagctctagccacctgcctaccctgccatctgaggatgacagccttcattccattggaacctggctctgccaccagcaggcttgcagtcctgggcagactccgtcacctctctatgcctcagcctttccatctgcacaggaggaagatgatgatggtggtgatgatgatggcgatggtttccttttgcatctgaggcaaggactaattgagatgatacacatcaggcactgggtatggtgctggtccttcctgagcactcaatctatgtgagctgtccttgtgaaatgggtgtcaccacatttccccacgcagaacatcctttgtctgccatacttgaaacatctgccccaatattaacagttccttcatggaagatgtgcacacccacccaccctcatactcccaaaggtgcccgtgctttatcaagccaaagtccagccaggaactttacagcagcatccctttccctctccaagcaccaaggagcaaggcaaagcactacatcttccatctggaggcaatgccaccctcttctcccattttcactgccatccctaagaggcagtgcttccccaaaaggttccatagcagcctgcctacagcaactctgttcacacgagtttcagcatccttgcagtggctcccctgccatgctgtggctcttcattcaccctcttctcctgctccccgtgacaggcatagattctgagtgatctggatacattgctttgtttaataacattacagcttctgtgctgaaaaagatacagcagatagagaaggcaattgttgaacacaaaatagtgacagcagagatgacggcaagttggcatttttcttttctagcaataaaacttaaagctgactcaaggagaaatggaaatcataattggaacagtaatcctcaagaaagcattaagattattaaataattgccctcacagatgacttcaggccaagatggctttatgggtgaagtttagactttcacaaaactaatcagttcccataagaactgctccaggatttggaggaacatgggaaagtctattaaagggatcacaattcacagtccccagagtaaaacatgggctaacttgcattttggcaaagagccaaatgttataaatgacatcctagaaggccaaattctgtccatctcgttgaacaaggacttacaccaggaatttagaactatttatagctcatcccaccactcaggccaatgatgacccatgatcatctcaccagaaatggaaagactcagatgattaatagagtctcaatttctctgagacatctaagagcccagcccaagcccagacccaggagggcacccaggcctggacagagaacactgatatcacaccagccctccagagggaagcagagactccttcaagctctggaaacacaggcccagacagctgcctaaagttgggcaggcttcactgcaaacccaaatcatgaagctaggtaacacctttacagattctttacatttaaaaatcatcaaaacaagagtaaataataaactcaaataatattaatctaatatgtaaaggtcttgtaccattattatgcaaacaacatacataagctaataagaaaaagaacaaatcccttaagaaatcggcaaaaaggatataacacaatttctaaaagaaaacaaatggctagcacacataaggaaaacactttgtgaacagacattcttcagaacattatttataattataaaatagttgaaagcaagatagtgcctgaagaaattatggtgcatacattagtgggactattctgcaaacattcccaattatacttgtcacatatctgtgataacgtgacagccagcattcatggggtgacctcatttggtaaaagggtgcaaagctcaacacgcattgtgagatgactgtggtgtaaaattagtgggattattccgcaaacattcccaattatacttaccgcatatctgtgataacatgacagcattcatggggtgacctcatttggtaaaagggtgcaaagctcaacacgcattgtgagatgactggtgtaaatacaaagaccaaactgtgaaaaggagtccatcaattaatcgatgcttaccttcagttttgggctaatttttaaagtatgctataagcatatgctcctgttataacagaatggagggattatgagagatgatgcaggtgtgtcctgggcctcccctggcccactgggccctagagatgccttcccaggcatcgctgtcagggcttccctcagagggagtcctgtattgacctcaccaccaaggtctggagcaggggatccttagatattggttggggttatctcaccttaggtctgaatttggggttgtcttagactgttttgtgctgttagaatagaatacccaagactgggaaatttatactgaacggaaatttatttctcacagttctagaggctgtgaagtccaagagcacaggtgccagagcaagtccaagagcaagggaaagtccaaagcaagtccaggagcatctggcgaggaccttcttgctgtgtcatcacatggcggaaggcaagaaagagagcaagagggggccgaactcacccttttataacagcaccaatcccacccatgaggtggggaccttatgacctaatcactcttcatactgttacaatggcaatgaaatttcaacatgagttttggaggagagaagcattcaaaccacagcaagggtgctcctacctcctctctcagggcatctgcagaaagagctgcaactgcacgtccttcctccgtccatcctccatcccttcccaatgtccgtgcatatcctgtgacccaggaggtctggcatagggggtgctcctgccttaggtctgaggccctgtctgaagaggggtaggtgaggaggccatctgatggtctgggccaagacagtcacaggacgcatcatttatcatcaaggaggctgagggttgagtctccaggtccagggaactccccacaaagtgggaaccctgcccagctccacacagcctctgctgggggaccctgctctggtgcagagcctggggacaggtcttgagctcagccagagtctgcctccctgtcatttaggaactaaaccaagcggcaggatgctggagcccagcccccatctgaccttacagggccaaggctggggccctgggttcccctcaaggcgcagcaggactggagccccaggcagtgcaggagtggccaaagctggggcttcctccagagcccccaagcatcacggcaccaagaagggtaggaccctggcctgaggaattggcaccaaagccccagaaactaccctggacaccatggagagaggcctggaggggaagcaccaggcactgcctccccttctgatcccacctgaggtggctgccaagcccagagagccgctctgatgtcccccagccctgcagcccagggatacctgtactgtgcccctgggggacccctggccagtctgtgcaaagaagtcaccaccctacactcagagacagtgggggtcctcgtcccacatcctcagagcatggcccggctgctgcagggatggtctcctggtcctcagagcatggcccggctgctgcagggatggtctcctggtcctcagagcatggcccagctgctgcagggatggtctcctggaggccccccagtgctctattgtcagggctccctccaccccccgcaccaagagagagccagaccccagcaaggcttccagtggcttcaggtcacacccctaggctgaccccagccccattaacacctgcctgagaaagctccacgcaccagaactgaccgtctgctccaactcttgacctcccgttctcagggcgtctgctgaaaaggctgcaactgcacatccttcctccgtccgttcccgatgtccgtgtgtctcctgtggccaggaaggtctttctcgggacctgagagccgctccctgaagtgtccccattgggaaggatggggcctgtgtctccaggctctgggaggacagaatcctgacctcaacagtggccggcacggacacaactggccccatcccggggacgctgaccagcgctgggcaacttttcccttccccgacgactgagccccgagcaccctccctgctcccctaccacctccctttacaaggctgtggcctctgcacagatgataatggagcttggctcattcccctagagtcggtagggagttaaggacaaaactcagtttcctccacctgaactcaagtctgcctatgtttacctaatcacacctggtggacagtttggacaaacttgcacactcagagacacagacacttctagaaatcattatctccctgccccggggaccccactccagcagaagtctgctaggcactggcctgggccctcctgctgtcctaggaggctgctgacctcctgcctggctcctgtccccaggtccagagtcagagcagactccagggacgctgcaggctaggaagccgccccctccaggcgagggtctagtgcaggtgcccaggacaagaaagattgtgaatgcaggaatgactgggccacacccctcccgtgcacgccccctcctgccctgcaccccacagcccagccccccgtgctggatgcccccccacagcagaggtgctgttctgtgatcccctgggaaagacgccctcaacctccaccctgtcccacggcccaaggaagacaagacacaggccctctcctcacagtctccccacctggctcctgctgggaccctcaaggtgtgaacagggaggatggttgtctgggtggcccctaggagcccagatcttcactccacagaccccaacccaagcacccccttctgcagggcccagctcatccccctcctcctccctctgctctcctctcgtcgcctctacgggaaatccgggactcagcagtaaccctcaggaagcagggcccaggcgccgtttaataggaggcttcctcacaatgaaacttttagaaagccttgactacaatgatgaccttggtgtggctgtgaacactgtcagctcccacagctgctgcagcaaaaaatgtccatagacagggtgggggcccggggtcgtctgctgtcctgctcagcccacagcacgcatggaggatctgaggtgccacacctgacgcccaggccagaacatgcctccctccagggtgacctgccatgtcctgcattgctggagggacaggggcagcctatgaggatctggggccaggagatgaatcctattaacccagaggaaaactaacaggacccaagcaccctccccgttgaagctgacctgcccagaggggcctgggcccaccccacacaccggggcggaatgtgtacaggccccggtctctgtgggtgttccgctaactggggctcccagtgctcaccccacaactaaagcgagccccagcctccagagcccccgaaggagatgccgcccacaagcccagcccccatccaggaggccccagagctcagggcgccggggcagattctgaacagccccgagtcacggtgggtacaactggaacgaccaccgtgagaaaaactgtgtccaaaactctctcctggcccctgctggaggccgcgccagagaggggagcagccgccccgaacctaggtcctgctcagctcacacgacccccagcagccagagcacagtggagtccccactgaaccccactgaatggtgaggacggggaccagggctccagggggtcatggaaggggctggaccccatcctactgctatggtcccagtgctcctggccagaactgaccctaccaccgacaagagtccctcagggaaacgggggtcactggcacctcccagcatcaaccccaggcagcacaggcataaaccccacatccagagccgactccaggagcagagacaccccagtaccctgggggacaccgaccctgatgactccccactggaatccaccccagagtccaccaggaccaaagaccccgccccggtctctgtccctcactcaggacctgctgcggggcgggccatgagaccagactcgggcttagggaacaccactgtggccccaacctcgaccaggccacaggcccttccttcctgccctgcggcagcacagactttggggtctgtgcagagaggaatcacagaggccccaggctgaggtggtgggggtggaagacccccaggaggtggcccacttcccttcctcccagctggaacccaccatgaccttcttaagataggggtgtcatccgaggcaggtcctccatggagctcccttcaggctcctccctggtcctcactaggcctcagtcccggctgtgggaatgcagccaccacaggcacaccaggcagcccagacccagccagcctgcagtgcccaagcccacattctggagcagagcaggctgtgtctgggagagtctgggctccccaccgcccccggcacaccccacccacccctgtccaggccctatgcaggagggtcagagccccccatggggtatggacttagggtctcactcacgcggctcccctcctgggtgaaggggtctcatgcccagatccccacagcagagctggtcaaaggtggaggcagtggccccagggccaccctgacctggaccctcaggctcctctagccctggctgccctgctgtccctgggaggcctggactccaccagaccacaggtccagggcaccgcccataggtgctgcccacactcagttcacaggaagaagataagctccagacccccaagactgggacctgccttcctgccaccgcttgtagctccagacctccgtgcctcccccgaccacttacacacgggccagggagctgttccacaaagatcaaccccaaaccgggaccgcctggcactcgggccgctgccacttccctctccatttgctcccagcacctctgtgctccctccctcctccctccttcaggggaacagcctgtgcagcccctccctgcaccccacaccctggggaggcccaaccctgcctccagccctttctcccccgctgctcttcctgcccatccagacaaccctggggtcccatccctgcagcctacaccctggtctccacccagacccctgtctctccctccagacacccctcccaggccaaccctgcacatgcaggccctccccttttctgctgccagagcctcagtttctaccctctgtgcctaccccctgcctcctcctgcccacaactcgagctcttcctctcctggggcccctgagccatggcactgaccgtgcactcccacccccacactgcccatgccctcaccttcctcctggacactctgaccctgctcccctcttggacccagccctggtatttccaggacaaaggctcacccaagtcttccccatgcaggcccttgccctcactgcccggttacacggcagcctcctgtgcacagaagcagggagctcagcccttccacaggcagaaggcactgaaagaaatcggcctccagcaccctgatgcacgtccgcctgtgtctctcactgcccgcacctgcagggaggctcggcactccctgtaaagacgagggatccaggcagcaacatcatgggagaatgcagggctcccagacagcccagccctctcgcaggcctctcctgggaagagacctgcagccaccactgaacagccacggagcccgctggatagtaactgagtcagtgaccgacctggagggcaggggagcagtgaaccggagcccagaccatagggacagagaccagccgctgacatcccgagcccctcactggcggccccagaacaccgcgtggaaacagaacagacccacattcccacctggaacagggcagacactgctgagcccccagcaccagccctgagaaacaccaggcaacggcatcagagggggctcctgagaaagaaaggaggggaggtctccttcaccagcaagtacttcccttgaccaaaaacagggtccacgcaactcccccaggacaaaggaggagccccctgtacagcactgggctcagagtcctctccaacacaccctgagtttcagacaaaaaccccctggaaatcatagtatcagcaggagaactagccagagacagcaagaggggactcagtgactcccgcggggacaggaggattttgtgggggctcgtgtcactgtgaggatattgtagtagtaccagctgctatgcccacagtgacacagccccattcccaaagccctgctgtaaacgcttccacttctggagctgaggggctggggggagcgtctgggaagtagggcctaggggtggccatcaatgcccaaaacgcaccagactcccccccagacatcaccccactggccagtgagcagagtaaacagaaaatgagaagcagctgggaagcttgcacaggccccaaggaaagagctttggcgggtgtgcaagaggggatgcgggcagagcctgagcagggccttttgctgtttctgctttcctgtgcagatagttccataaactggtgttcaagatcgatggctgggagtgagcccaggaggacagtgtgggaagggcacagggaaggagaagcagccgctatcctacactgtcatctttcaagagtttgccctgtgcccacaatgctgcatcatgggatgcttaacagctgatgtagacacagctaaagagagaatcagtgaaatggatttgcagcacagatctgaataaattctccagaatgtggagccacacagaagcaagcacaaggaaagtgcctgatgcaagggcaaagtacagtgtgtaccttcaggctgggcacagacactctgaaaagccttggcaggaactccctgcaacaaagcagagccctgcaggcaatgccagctccagagccctccctgagagcctcatgggcaaagatgtgcagaacatatgtttgtcatagccccaaactgagaatgaagcaaacagccatctgaaggaaaacaggcaaataaacgatggcaggttcatgaaatgcaaacccagacagccagaaggacaacagtgagggttacaggtgactctgtggttgagttcatgacaatgctgagtaattggagtaacaaaggaaagtccaaaaaatactttcaatgtgatttcttctaaataaaatttacagccggcaaaatgaactatcttcttaagggataaactttccactaggaaaactataaggaaaatcaagaaaaggatgatcacataaacacagtggtcgttacttctactggggaaggaagagggtatgaactgagacacacagggttggcaagtctcctaacaagaagagaacaaatacattacagtaccttgaaaacagcagttaaaattctaaattgcaagaagaggaaaatgcacacagctgtgtttagaaaattctcagtccagcactgttcataatagcaaagacattaacccaggttggataaataaacgatgacacaggcaattgcacaatgatacagacatacattcagtatatgagacattgatgatgtatccccaaagaaatgactttaaagagaaaaggcctgatatgtggtggcactcacctccctgggcatccccggacaggctgcaggcacactgtgtggcagggcaggctggtacctgctggcagctcctggggcctgatgtggagcaggcacagagccgtatccccccgaggacatatacccccaaggacggcacagttggtacattccggagacaagcaactcagccacactcccaggccagagcccgagagggacgcccatgcacagggaggcagagcccagctcctccacagccagcagcacctgtgcaggggccgccatctggcaggcacagagcatgggctgggaggaggggcagggacaccaggcagggttggcaccaactgaaaattacagaagtctcatacatctacctcagccttgcctgacctgggcctcacctgacctggacctcacctggcctggacctcacctggcctagacctcacctctgggcttcacctgagctcggcctcacctgacttggaccttgcctgtcctgagctcacatgatctgggcctcacctgacctgggtttcacctgacctgggcttcacctgacctgggcctcatctgacctgggcctcactggcctggacctcacctggcctgggcttcacctggcctcaggcctcatctgcacctgctccaggtcttgctggaacctcagtagcactgaggctgcaggggctcatccagggttgcagaatgactctagaacctcccacatctcagctttctgggtggaggcacctggtggcccagggaatataaaaagcctgaatgatgcctgcgtgatttgggggcaatttataaacccaaaaggacatggccatgcagcgggtagggacaatacagacagatatcagcctgaaatggagcctcagggcacaggtgggcacggacactgtccacctaagccaggggcagacccgagtgtccccgcagtagacctgagagcgctgggcccacagcctcccctcggtgccctgctacctcctcaggtcagccctggacatcccgggtttccccaggcctggcggtaggtttggggtgaggtctgtgtcactgtggtattacgatttttggagtggttattatacccacagtgtcacagagtccatcaaaaacccatccctgggaacctgctgccacagccctccctgtggggcaccgccgcgtgccatgttaggattttgactgaggacacagcaccatgggtatggtggctaccgcagcagtgcagcctgtgacccaaacacacagggcagcaggcacaacagacaagcccacaagtgaccaccctgagctcctgcctgccagccctggagaccatgaaacagatggccaggattatcccataggtcagccagacctcagtccaacaggtctgcatcgctgctgccctccaataccagtccggatggggacagggccggcccacattaccatttgctgccatccggccaacagtcccagaagcccctccctcaaggctgggccacatgtgtggaccctgagagccccccatgtctgagtaggggcaccaggaaggtggggctggccctgtgcactgtcactgcccctgtggtccctggcctgcctggccctgacacctgggcctctcctgggtcatttccaagacagaagacattcccaggacagctggagctgggagtccatcatcctgcctggccatcctgagtcctgcgcctttccaaacctcacccgggaagccaacagaggaatcacctcccacaggcagagacaaagaccttccagaaatctctgtctctctccccagtgggcaccctcttccagggcagtcctcagtgatatcacagtgggaacccacatctggatcgggactgcccccagaacacaagatggcccacagggacagccccacagcccagcccttcccagacccctaaaaggcgtcccaccccctgcatctgccccagggctcaaactccaggaggactgactcctgcacaccctcctgccagacatcacctcagcccctcctggaagggacaggagcgcgcaagggtgagtcagaccctcctgccctcgatggcaggcggagaagattcagaaaggtctgagatccccaggacgcagcaccactgtcaatgggggccccagacgcctggaccagggcctgcgtgggaaaggcctctgggcacactcaggggctttttgtgaagggtcctcctactgtgtgactacagtaactaccacagtgatgaacccagcagcaaaaactgaccggactcccaaggtttatgcacacttctccgctcagagctctccaggatcagaagagccgggcccaagggtttctgcccagaccctcggcctctagggacatcttggccatgacagcccatgggctggtgccccacacatcgtctgccttcaaacaagggcttcagagggctctgaggtgacctcactgatgaccacaggtgccctggccccttccccgccagctgcaccagaccccgtcctgacagatgccccgattccaacagccaattcctggggccaggaatcgctgtagacaccagcctccttccaacacctcttgccaattgcctggattcccatcccggttggaatcaagaggacagcatcccccaggctcccaacaggcaggactcccacaccctcctctgagaggccgctgtgttccgtagggccaggctgcagacagtccccctcacctgccactagacaaatgcctgctgtagatgtccccacctggaaaagaccactcatggagcccccagccccaggtacagccatagagagagtctctgaggcccctaagaagtagccatgcccagttctgccgggaccctcggccaggctgacaggagtggacgctggagctgggcccacactgggccacataggagctcaccagtgagggcaggagagcacatgccggggagcacccagcctcctgctgaccagaggcccgtcccagagcccaggaggctgcagaggcctctccagggggacactgtgcatgtctggtccctgagcagccccccatgtccccagtcctgggggcccctggcacagctgtctggaccctctctattccctgggaagctcctcctgacagccccgcctccagttccaggtgtggttattgtcagggggtgtcagactgtggtggatacagctatggttaccacagtggtgctgcccatagcagcaaccaggccaagtagacaggcccctgctgtgcagccccaggcctccagctcacctgcttctcctggggctctcaaggctgctgttttctgcactctcccctctgtggggagggttccctcagtgggagatctgttctcaacatcccagggcctcattcctgcaaggaaggccaatggatgggcaacctcacatgccgcggctaagatagggtgggcagcctggcggggacaggacatcctgctggggtatctgtcactgtgcctagtggggcactggctcccaaacaacgcagtcctcgccaaaatccccacggcctcccccgctaggggctggcctgatctcctgcagtcctaggaggctgctgacctccagaatggctccgtccccagttccagggcgagagcagatcccaggccggctgcagactgggaggccaccccctccttcccagggttcactgcaggtgaccagggcaggaaatggcctgaacacagggataaccgggccatcccccaacagagtccaccccctcctgctctgtaccccgcacccccaaggccagcccatgacatccgacaaccccacaccagagtcactgcccggtgctgccctagggaggacccctcagcccccaccctgtctagaggactggggaggacaggacacgccctctccttatggttcccccacctggctctggctgggacccttggggtgtggacagaaaggacgcttgcctgattggcccccaggagcccagaacttctctccagggaccccagcccgagcacccccttacccaggacccagccctgcccctcctcccatctgctctcctctcatcaccccatgggaatccagaatccccaggaagccatcaggaagggctgagggaggaagtggggccactgcaccaccaggcaggaggctccgtctttgtgaacccagggaggtgccagcctcctagagggtatggtccaccctgcctatggctcccacagtggcaggctgcagggaaggaccagggacggtgtgggggagggctcagggccccgcgggtgctccatcttggatgagcccatctctctcacccacggactcacccacctcctctccaccctggccacacgtcgtccacaccatcctaagtcccacctacaccagagccggcacagccagtgcagacagaggctggggtgcaggggggccgccagggcagctttggggagggaaggatggaggaaggggagttcagtgaagaggcccccctcccctgggtccaggatcctcctctgggacccccggatcccatcccctccaggctctgggaggagaagcaggatgggagaatctgtgcgggaccctctcacagtggaatacctccacagcggctcaggcaagacccaaaagcccctcagtgagccctccactgcagtcctgggcctgggtagcagcccctcccacagaggatgaacccagcaccccgaggatgtcctgccagggggagctcagagccatgaaggagcaggatatgggacccccgatacaggcacagacctcagctccattcaggactgccacgtcctgccctgggaggaacccctttctctagtccctgcaggccaggaggcagctgactcctgacttggacgcctattccagacaccagacagaggggcaggccccccagaaccagggatgaggacgccccgtcaaggccagaaaagaccaagttgtgctgagcccagcaagggaaggtccccaaacaaaccaggaagtttctgaaggtgtctgtgtcacagtggagtatagcagctcgtcccacagtgacactcgccaggccagaaaccccatcccaagtcagcggaatgcagagagagcagggaggacatgtttaggatctgaggccgcacctgacacccaggccagcagacgtctcctgtccatggcaccctgccatgtcctgcatttctggaagaacaagggcaggctgaagggggtccaggaccaggagatgggtcccctctacccagagaaggagccaggcaggacacaagccccctccccattgaggctgacctgcccagagggtcctgggcccaccccacacaccggggcggaatgtgtgcaggcctcggtctctgtgggtgttccgctagctggggctcacagtgctcaccccacacctaaaacgagccacagcctcagagcccctgaaggagaccccgcccacaagcccagcccccacccaggaggccccagagcacagggcgccccgtcggattctgaacagccccgagtcacagtgggtataactggaactaccactgtgagaaaagcttcgtccaaaacggtctcctggccacagtcggaggccccgccagagaggggagcagccaccccaaacccatgttctgccggctcccatgaccccgtgcacctggagccccacagtgtccccactggatgggaggacaagggccgggggctccggcgggtcggggcaggggcttgatggcttccttctgccgtggctccagtgcccctggctggagttgacccttctgacaagtgtcctcagagagtcagggatcagtggcacctccctaacatcaaccccacgcagcgcaggcacaaaccccacatccagggccaactccaggaacagagacaccccaataccctgggggaccccaaccctgatgactcccgtcccatctctgtccctcacttggggcctgctgcggggcgagcacctgggagcaaactcaggattaggggacaccactgtgggcctgacctcgagcaggccacagacccttccctcctgccctggtgcagcacagactttggggtctgggcagggaggaacttctggcaggtcaccaagcacagagcccccaggctgaggtggccccagggggaaccccagcaggtggcccactacccttcctcccagctggaccccatgtcttccccaagataggggtgccatccaaggcaggtcctccatggagcccccttcaggctcctctccagaccccactgggcctcagtccccactctaggaatgcagccaccacgggcacaccaggcagcccaggcccagccaccctgcagtgcccaagcccacaccctggaggagagcagggtgcgtctgggaggggctgggctccccacccccacccccacctgcacaccccacccacccttgcccgggccccctgcaggagggtcagagcccccatgggatatggacttagggtctcactcacgcacctcccctcctgggagaaggggtctcatgcccagatccccccagcagcgctggtcacaggtagaggcagtggccccagggccaccctgacctggcccctcaggctcctctagccctggctgccctgctgtccctgggaggcctgggctccaccagaccacaggtctagggcaccgcccacactggggccgcccacacacagctcacaggaagaagataagctccagacccccaggcccgggacctgccttgctgctacgacttcctgccccagacctcgttgccctcccccgtccacttacacacaggccaggaagctgttcccacacagaccaaccccagacggggaccacctggcactcaggtcactgccatttccttctccattcacttccaatgcctctgtgcttcctccctcctccttccttcgggggagcaccctgtgcagctcctccctgcagtccacaccctggggagacccgaccctgcagcccacaccctggggagacctgaccctcctccagccctttctcccccgctgctcttgccacccaccaagacagccctggggtcctgtccctacagcccccacccagttctctacctagacccgtcttcctccctctaaacacctctcccaggccaaccctacacctgcaggccctcccctccactgccaaagaccctcagtttctcctgcctgtgcccacccccgtgctcctcctgcccacagctcgagctcttcctctcctagggcccctgagggatggcattgaccgtgccctcgcacccacacactgcccatgccctcacattcctcctggccactccagccccactcccctctcaggcctggctctggtatttctgggacaaagccttacccaagtctttcccatgcaggcctgggcccttaccctcactgcccggttacagggcagcctcctgtgcacagaagcagggagctcagcccttccacaggcagaaggcactgaaagaaatcggcctccagcgccttgacacacgtctgcctgtgtctctcactgcccgcacctgcagggaggctcggcactccctctaaagacgagggatccaggcagcagcatcacaggagaatgcagggctaccagacatcccagtcctctcacaggcctctcctgggaagagacctgaagacgcccagtcaacggagtctaacaccaaacctccctggaggccgatgggtagtaacggagtcattgccagacctggaggcaggggagcagtgagcccgagcccacaccatagggccagaggacagccactgacatcccaagccactcactggtggtcccacaacaccccatggaaagaggacagacccacagtcccacctggaccagggcagagactgctgagacccagcaccagaaccaaccaagaaacaccaggcaacagcatcagagggggctctggcagaacagaggaggggaggtctccttcaccagcaggcgcttcccttgaccgaagacaggatccatgcaactcccccaggacaaaggaggagccccttgttcagcactgggctcagagtcctctccaagacacccagagtttcagacaaaaaccccctggaatgcacagtctcagcaggagagccagccagagccagcaagatggggctcagtgacacccgcagggacaggaggattttgtgggggctcgtgtcactgtgaggatattgtactaatggtgtatgctatacccacagtgacacagccccattcccaaagccctactgcaaacgcattccacttctggggctgaggggctgggggagcgtctgggaaatagggctcaggggtgtccatcaatgcccaaaacgcaccagactcccctccatacatcacacccaccagccagcgagcagagtaaacagaaaatgagaagcaagctggggaagcttgcacaggccccaaggaaagagctttggcgggtgtgtaagaggggatgcgggcagagcctgagcagggccttttgctgtttctgctttcctgtgcagagagttccataaactggtgttcgagatcaatggctgggagtgagcccaggaggacagcgtgggaagagcacagggaaggaggagcagccgctatcctacactgtcatctttcgaaagtttgccttgtgcccacactgctgcatcatgggatgcttaacagctgatgtagacacagctaaagagagaatcagtgagatggatttgcagcacagatctgaataaattctccagaatgtggagcagcacagaagcaagcacacagaaagtgcctgatgcaaggacaaagttcagtgggcaccttcaggcattgctgctgggcacagacactctgaaaagccctggcaggaactccctgtgacaaagcagaaccctcaggcaatgccagccccagagccctccctgagagcctcatgggcaaagatgtgcacaacaggtgtttctcatagccccaaactgagagcaaagcaaacgtccatctgaaggagaacaggcaaataaacgatggcaggttcatgaaatgcaaacccagacagccacaagcacaaaagtacagggttataagcgactctggttgagttcatgacaatgctgagtaattggagtaacaaagtaaactccaaaaaatactttcaatgtgatttcttctaaataaaatttacaccctgcaaaatgaactgtcttcttaagggatacatttcccagttagaaaaccataaagaaaaccaagaaaaggatgatcacataaacacagtggtggttacttctgctggggaaggaagagggtatgaactgagatacacagggtgggcaagtctcctaacaagaacagaacgaatacattacagtaccttgaaaacagcagttaaacttctaaattgcaagaagaggaaaatggacacagttgtgtttagaaaattctcagtccagcactgttcataatagcaaagacattaacccaggtcggataaataagcgatgacacaggcaattgcacaatgatacagacatatatttagtatatgagacatcgatgatgtatccccaaataaacgactttaaagagataaagggctgatgtgtggtggcattcacctccctgggatccccggacaggttgcaggctcactgtgcagcagggcaggcgggtacctgctggcagttcctggggcctgatgtggagcaagcgcagggccatatatcccggaggacggcacagtcagtgaattccagagagaagcaactcagccacactccccaggcagagcccgagagggacgcccacgcacagggaggcagagcccagcacctccgcagccagcaccacctgtgcacgggccaccaccttgcaggcacagagtgggtgctgagaggaggggcagggacaccaggcagggtgagcacccagagaaaactgcagacgcctcacacatccacctcagcctcccctgacctggacctcactggcctgggcctcacttaacctgggcttcacctgaccttggcctcacctgacttggacctcgcctgtcccaagctttacctgacctgggcctcaactcacctgaacgtctcctgacctgggtttaacctgtcctggaactcacctggccttggcttcccctgacctggacctcatctggcctgggcttcacctggcctgggcctcacctgacctggacctcatctggcctggacctcacctggcctggacttcacctggcctgggcttcacctgacctggacctcacctggcctcgggcctcacctgcacctgctccaggtcttgctggagcctgagtagcactgagggtgcagaagctcatccagggttggggaatgactctagaagtctcccacatctgacctttctgggtggaggcagctggtggccctgggaatataaaaatctccagaatgatgactctgtgatttgtgggcaacttatgaacccgaaaggacatggccatggggtgggtagggacatagggacagatgccagcctgaggtggagcctcaggacacaggtgggcacggacactatccacataagcgagggatagacccgagtgtccccacagcagacctgagagcgctgggcccacagcctcccctcagagccctgctgcctcctccggtcagccctggacatcccaggtttccccaggcctgccggtaggtttagaatgaggtctgtgtcactgtggtattacgatattttgactggttattataaccacagtgtcacagagtccatcaaaaacccatgcctggaagcttcccgccacagccctccccatggggccctgctgcctcctcaggtcagccccggacatcccgggtttccccaggctgggcggtaggtttggggtgaggtctgtgtcactgtggtattactatggttcggggagttattataaccacagtgtcacagagtccatcaaaaacccatccctgggagcctcccgccacagccctccctgcaggggaccggtacgtgccatgttaggattttgatcgaggagacagcaccatgggtatggtggctaccacagcagtgcagcctgtgacccaaacccgcagggcagcaggcacgatggacaggcccgtgactgaccacgctgggctccagcctgccagccctggagatcatgaaacagatggccaaggtcaccctacaggtcatccagatctggctccgaggggtctgcatcgctgctgccctcccaacgccagtccaaatgggacagggacggcctcacagcaccatctgctgccatcaggccagcgatcccagaagcccctccctcaaggctgggccacatgtgtggacactgagagccctcatgtctgagtaggggcaccaggagggaggggctggccctgtgcactgtccctgcccctgtggtccctggcctgcctggccctgacacctgagcctctcctgggtcatttccaagacagaagacattcctggggacagccggagctgggcgtcgctcatcctgcccggccgtcctgagtcctgctcatttccagacctcaccggggaagccaacagaggactcgcctcccacattcagagacaaagaaccttccagaaatccctgcctctctccccagtggacaccctcttccaggacagtcctcagtggcatcacagcggcctgagatccccaggacgcagcaccgctgtcaataggggccccaaatgcctggaccagggcctgcgtgggaaaggtctctggccacactcgggctttttgtgaagggccctcctgctgtgtgactacagtaactaccatagtgatgaacccagtggcaaaaactggctggaaacccaggggctgtgtgcacgcctcagcttggagctctccaggagcacaagagccgggcccaaggatttgtgcccagaccctcagcctctagggacacctgggccatctcagcctgggctggtgccctgcacaccatcttcctccaaataggggcttcagagggctctgaggtgacctcactcatgaccacaggtgacctggcccttccctgccagctataccagaccctgtcttgacagatgccccgattccaacagccaattcctgggaccctgaatagctgtagacaccagcctcattccagtacctcctgccaattgcctggattcccatcctggctggaatcaagaaggcagcatccgccaggctcccaacaggcaggactcccgcacaccctcctctgagaggccgctgtgttccgcagggccaggccctggacagttcccctcacctgccactagagaaacacctgccattgtcgtccccacctggaaaagaccactcgtggagcccccagccccaggtacagctgtagagagagtcctcgaggcccctaagaaggagccatgcccagttctgccgggaccctcggccaggccgacaggagtggacgctggagctgggcccacactgggccacataggagctcaccagtgagggcaggagagcacatgccggggagcacccagcctcctgctgaccagaggcctgccccagagcccaggaggctgcagaggcctctccagggagacactgtgcatgtctggtacctaagcagccccccacgtccccagtcctgggggcccctggctcagctgtctggaccctccctgttccctgggaagctcctcctgacagccccgcctccagttccaggtgtggttattgtcaggcgatgtcagactgtggtggatatagtggctacgattaccacagtggtgccgcccatagcagcaaccaggccaagtagacaggcccctgctgcgcagccccaggcatccacttcacctgcttctcctggggctctcaaggctgctgtctgtcctctggccctctgtggggagggttccctcagtgggaggtctgtgctccagggcagggatgattgagatagaaatcaaaggctggcagggaaaggcagcttcccgccctgagaggtgcaggcagcaccacggagccacggagtcacagagccacggagcccccattgtgggcatttgagagtgctgtgcccccggcaggcccagccctgatggggaagcctgtcccatcccacagcccgggtcccacgggcagcgggcacagaagctgccaggttgtcctctatgatcctcatccctccagcagcatcccctccacagtggggaaactgaggcttggagcaccacccggccccctggaaatgaggctgtgagcccagacagtgggcccagagcactgtgagtaccccggcagtacctggctgcagggatcagccagagatgccaaaccctgagtgaccagcctacaggaggatccggccccacccaggccactcgattaatgctcaaccccctgccctggagacctcttccagtaccaccagcagctcagcttctcagggcctcatccctgcaaggaaggtcaagggctgggcctgccagaaacacagcaccctccctagccctggctaagacagggtgggcagacggctgtggacgggacatattgctggggcatttctcactgtcacttctgggtggtagctctgacaaaaacgcagaccctgccaaaatccccactgcctcccgctaggggctggcctggaatcctgctgtcctaggaggctgctgacctccaggatggctccgtccccagttccagggcgagagcagatcccaggcaggctgtaggctgggaggccacccctgcccttgccggggttgaatgcaggtgcccaaggcaggaaatggcatgagcacagggatgaccgggacatgccccaccagagtgcgccccttcctgctctgcaccctgcaccccccaggccagcccacgacgtccaacaactgggcctgggtggcagccccacccagacaggacagacccagcaccctgaggaggtcctgccagggggagctaagagccatgaaggagcaagatatggggcccccgatacaggcacagatgtcagctccatccaggaccacccagcccacaccctgagaggaacgtctgtctccagcctctgcaggtcgggaggcagctgacccctgacttggacccctattccagacaccagacagaggcgcaggccccccagaaccagggttgagggacgccccgtcaaagccagacaaaaccaaggggtgttgagcccagcaagggaaggcccccaaacagaccaggaggtttctgaaggtgtctgtgtcacagtggggtatagcagcagctggtaccacagtgacactcacccagccagaaaccccattccaagtcagcggaagcagagagagcagggaggacacgtttaggatctgagactgcacctgacacccaggccagcagacgtctcccctccagggcaccccaccctgtcctgcatttctgcaagatcaggggcggcctgagggggggtctagggtgaggagatgggtcccctgtacaccaaggaggagttaggcaggtcccgagcactctccccattgaggctgacctgcccagagagtcctgggcccaccccacacaccggggcggaatgtgtgcaggcctcggtctctgtgggtgttccgctagctggggctcacagtgctcaccccacacctaaaatgagccacagcctccggagcccccgcaggagaccccgcccacaagcccagcccccacccaggaggccccagagctcagggcgccccgtcggattccgaacagccccgagtcacagcgggtataaccggaaccaccactgtcagaatagctacgtcaaaaactgtccagtggccactgccggaggccccgccagagagggcagcagccactctgatcccatgtcctgccggctcccatgacccccagcacgcggagccccacagtgtccccactggatgggaggacaagagctggggattccggcgggtcggggcaggggcttgatcgcatccttctgccgtggctccagtgcccctggctggagttgacccttctgacaagtgtcctcagagagacaggcatcaccggcgcctcccaacatcaaccccaggcagcacaggcacaaaccccacatccagagccaactccaggagcagagacaccccaataccctgggggaccccgaccctgatgacttcccactggaattcgccgtagagtccaccaggaccaaagaccctgcctctgcctctgtccctcactcaggacctgctgccgggcgaggccttgggagcagacttgggcttaggggacaccagtgtgaccccgaccttgaccaggacgcagacctttccttcctttcctggggcagcacagactttggggtctgggccaggaggaacttctggcaggtcgccaagcacagaggccacaggctgaggtggccctggaaagacctccaggaggtggccactccccttcctcccagctggaccccatgtcctccccaagataagggtgccatccaaggcaggtgctccttggagccccattcagactcctccctggaccccactgggcctcagtcccagctctggggatgaagccaccacaagcacaccaggcagcccaggcccagccaccctgcagtgcccaagcacacactctggagcagagcagggtgcctctgggaggggctgagctccccaccccacccccacctgcacaccccacccacccctgcccagcggctctgcaggagggtcagagccccacatggggtatggacttagggtctcactcacgtggctcccatcatgagtgaaggggcctcaagcccaggttcccacagcagcgcctgtcgcaagtggaggcagaggcccgagggccaccctgacctggtccctgaggttcctgcagcccaggctgccctgctgtccctgggaggcctgggctccaccagaccacaggtccagggcaccgggtgcaggagccacccacacacagctcacaggaagaagataagctccagacccccagggccagaacctgccttcctgctactgcttcctgccccagacctgggcgccctcccccgtccacttacacacaggccaggaagctgttcccacacagaacaaccccaaaccaggaccgcctggcactcaggtggctgccatttccttctccatttgctcccagcgcctctgtcctccctggttcctccttcgggggaacagcctgtgcagccagtccctgcagcccacaccctggggagacccaaccctgcctggggcccttccaaccctgctgctcttactgcccacccagaaaactctggggtcctgtccctgcagtccctaccctggtctccacccagacccctgtgtatcactccagacacccctcccaggccaaccctgcacctgcaggccctgtcctcttctgtcgctagagcctcagtttctcccccctgtgcccacaccctacctcctcctgcccacaactctaactcttcttctcctggagcccctgagccatggcattgaccctgccctcccaccacccacagcccatgccctcaccttcctcctggccactccgaccccgccccctctcaggccaagccctggtatttccaggacaaaggctcacccaagtctttcccaggcaggcctgggctcttgccctcacttcccggttacacgggagcctcctgtgcacagaagcagggagctcagcccttccacaggcagaaggcactgaaagaaatcggcctccagcaccttgacacacgtccgcccgtgtctctcactgcccgcacctgcagggaggctccgcactccctctaaagacaagggatccaggcagcagcatcacgggagaatgcagggctcccagacatcccagtcctctcacaggcctctcctgggaagagacctgcagccaccaccaaacagccacagaggctgctggatagtaactgagtcaatgaccgacctggagggcaggggagcagtgagccggagcccataccatagggacagagaccagccgctgacatcccgagctcctcaatggtggccccataacacacctaggaaacataacacacccacagccccacctggaacagggcagagactgctgagcccccagcaccagccccaagaaacaccaggcaacagtatcagagggggctcccgagaaagagaggaggggagatctccttcaccatcaaatgcttcccttgaccaaaaacagggtccacgcaactcccccaggacaaaggaggagccccctatacagcactgggctcagagtcctctctgagacaccctgagtttcagacaacaacccgctggaatgcacagtctcagcaggagaacagaccaaagccagcaaaagggacctcggtgacaccagtagggacaggaggattttgtgggggctcgtgtcactgtgaggatattgtagtggtggtagctgctactcccacagtgacacagacccattcccaaagccctactgcaaacacacccactcctggggctgaggggctgggggagcgtctgggaagtagggtccaggggtgtctatcaatgtccaaaatgcaccagactccccgccaaacaccaccccaccagccagcgagcagggtaaacagaaaatgagaggctctgggaagcttgcacaggccccaaggaaagagctttggcaggtgtgcaagaggggatgcaggcagagcctgagcagggccttttgctgtttctgctttcctgtgcagagagttccataaactggtgttcaagatcagtggctgggaatgagcccaggagggcagtctgtgggaagagcacagggaaggaggagcagccgctatcctacactgtcatctttcaaaagtttgccttgtgaccacactattgcatcatgggatgcttaagagctgatgtagacacagctaaagagagaatcagtgagatgaatttgcagcatagatctgaataaactctccagaatgtggagcagtacagaagcaaacacacagaaagtgcctgatgcaaggacaaagttcagtgggcaccttcaggcattgctgctgggcacagacactctgaaaagccctggcaggatctccctgcgacaaagcagaaccctcaggcaatgccagccccagagccctccctgagagcgtcatggggaaagatgtgcagaacagctgattatcatagactcaaactgagaacagagcaaacgtccatctgaagaacagtcaaataagcaatggtaggttcatgcaatgcaaacccagacagccaggggacaacagtagagggctacaggcggctttgcggttgagttcatgacaatgctgagtaattggagtaacagaggaaagcccaaaaaatacttttaatgtgatttcttctaaataaaatttacaccaggcaaaatgaactgtcttcttaagggataaactttcccctggaaaaactacaaggaaaattaagaaaacgatgatcacataaacacagttgtggttacttctactggggaaggaagagggtatgagctgagacacacagagtcggcaagtctccaagcaagcacagaacgaatacattacagtaccttgaatacagcagttaaacttctaaatcgcaagaagaggaaaatgcacacagctgtgtttagaaaattctcagtccagcactattcataatagcaaagacattaacccaggttggataaataaatgatgacacaggcaattgcacaatgatacagacatacatttagtacatgagacatcgatgatgtatccccaaagaaatgactttaaagagaaaaggcctgatgtgtggtggcactcacctccctgggatccccggacaggttgcaggcacactgtgtggcagggcaggctggtacatgctggcagctcctggggcctgatgtggagcaagcgcagggctgtatacccccaaggatggcacagtcagtgaattccagagagaagcagctcagccacactgcccaggcagagcccgagagggacgcccacgcacagggaggcagagcccagctcctccacagccaccaccacctgtgcacgggccaccaccttgcaggcacagagtgggtgctgagaggaggggcagggacaccaggcagggtgagcacccagagaaaactgcagaagcctcacacatccacctcagcctcccctgacctggacctcacctggtctggacctcacctggcctgggcctcacctgacctggacctcacctggcctgggcttcacctgacctggacctcacctggcctccggcctcacctgcacctgctccaggtcttgctggaacctgagtagcactgaggctgcagaagctcatccagggttggggaatgactctggaactctcccacatctgacctttctgggtggaggcatctggtggccctgggaatataaaaagccccagaatggtgcctgcgtgatttgggggcaatttatgaacccgaaaggacatggccatggggtgggtagggacatagggacagatgccagcctgaggtggagcctcaggacacagttggacgcggacactatccacataagcgagggacagacccgagtgttcctgcagtagacctgagagcgctgggcccacagcctcccctcggtgccctgctgcctcctcaggtcagccctggacatcccgggtttccccaggcctggcggtaggtttgaagtgaggtctgtgtcactgtggtattatgattacgtttgggggagttatcgttatacccacagcatcacacggtccatcagaaacccatgccacagccctccccgcaggggaccgccgcgtgccatgttacaattttgatcgaggacacagcgccatgggtatggtggctaccacagcagtgcagcccatgacccaaacacacagggcagcaggcacaatggacaggcctgtgagtgaccatgctgggctccagcccgccagccccggagaccatgaaacagatggccaaggtcaccccacagttcagccagacatggctccgtggggtctgcatcgctgctgccctctaacaccagcccagatggggacaaggccaaccccacattaccatctcctgctgtccacccagtggtcccagaagcccctccctcatggctgagccacatgtgtgaaccctgagagcaccccatgtcagagtaggggcagcagaagggcggggctggccctgtgcactgtccctgcacccatggtccctcgcctgcctggccctgacacctgagcctcttctgagtcatttctaagatagaagacattcccggggacagccggagctgggcgtcgctcatcctgcccggccgtcctgagtcctgcttgtttccagacctcaccagggaagccaacagaggactcacctcacacagtcagagacaaagaaccttccagaaatccctgtctcactccccagtgggcaccttcttccaggacattcctcggtcgcatcacagcaggcacccacatctggatcaggacggcccccagaacacaagatggcccatggggacagccccacaacccaggccttcccagacccctaaaaggcgtcccaccccctgcacctgccccagggctaaaaatccaggaggcttgactcccgcataccctccagccagacatcacctcagccccctcctggaggggacaggagcccgggagggtgagtcagacccacctgccctcgatggcaggcggggaagattcagaaaggcctgagatccccaggacgcagcaccactgtcaatgggggccccagacgcctggaccagggcctgcgtgggaaaggccgctgggcacactcaggggctttttgtgaaggcccctcctactgtgtgactacggtgactaccacagtgatgaaactagcagcaaaaactggccggacacccagggaccatgcacacttctcagcttggagctctccaggaccagaagagtcaggtctgagggtttgtagccagaccctcggcctctagggacaccctggccatcacagcggatgggctggtgccccacatgccatctgctccaaacaggggcttcagagggctctgaggtgacttcactcatgaccacaggtgccctggccccttccccgccagctacaccgaaccctgtcccaacagctgccccagttccaacagccaattcctggggcccagaattgctgtagacaccagcctcgttccagcacctcctgccaattgcctggattcacatcctggctggaatcaagagggcagcatccgccaggctcccaacaggcaggactcccgcacaccctcctctgagaggccgctgtgttccgcagggccaggccctggacagttcccctcacctgccactagagaaacacctgccattgtcgtccccacctggaaaagaccactcgtggagcccccagccccaggtacagctgtagagagactccccgagggatctaagaaggagccatgcgcagttctgccgggaccctcggccaggccgacaggagtggacactggagctgggcccacactgggccacataggagctcaccagtgagggcaggagagcacatgccggggagcacccagcctcctgctgaccagaggcctgccccagagcccaggaggctgcagaggcctctccagggggacactgtgcatgtctggtccctgagcagccccccatgtccccagtcctgggggcccctggcacagctgtctggaccctccctgttccctgggaagctcctcctgacagccccgcctccagttccaggtgtggttattgtcagggggtgtcagactgtggtggatacagctatggttaccacagtggtgctgcccatagcagcaaccaggccaagtagacaggcccctgctgtgcagccccaggcctccagctcacctgcttctcctggggctctcaaggtcactgttgtctgtactctgccctctgtggggagggttctctcagtgggaggtctgttctcaacatcccagggcctcatgtctgcacggaaggccaatggatgggcaacctcacatgccgcggctaagatagggtgggcagcctggcgggggacagtacatactgctggggtgtctgtcactgtgcctagtggggcactggctcccaaacaacgcagtcctcaccaaaatccccacagcctcccctgctaggggctggcctgatctcctgcagtcctaggaggctgctgacctccagaatgtctccgtccccagttccagggcgagagcagatcccaggccggctgcagactgggaggccaccccctccttcccagggttcactggaggtgaccaaggtaggaaatggccttaacacagggatgactgcgccatcccccaacagagtcagccccctcctgctctgtaccccgcaccccccaggccagtccacgaaaaccagggccccacatcagagtcactgcctggcccggccctggggcggacccctcagcccccaccctgtctagaggacttggggggacaggacacaggccctctccttatggttcccccacctgcctccggccgggacccttggggtgtggacagaaaggacacctgcctaattggcccccaggaacacagaacttctctccagggaccccagcccgagcacccccttacccaggacccagccctgcccctcctcccctctgctctcctctcatcaccccatgggaatccggtatccccaggaagccatcaggaagggctgaaggaggaagcggggccgtgcaccaccgggcagcaggctccgtcttcgtgaacccagggaagtgccagcctcctagagggtatggtccaccctgcctggggctcccaccgtggcaggctgcggggaaggaccagggacggtgtgggggagggctcagggccctgcgggtgctcctccatcttcggtgagcctcccccttcacccaccgtcccgcccacctcctctccaccctggctgcacgtcttccacaccatcctgagtcctacctacaccagagccagcaaagccagtgcagacaaaggctggggtgcaggggggctgccagggcagcttcggggagggaaggatggagggaggggaggtcagtgaagaggcccccttcccctgggtccaggatcctcctctgggacccccggctcccatcccctcctggctctgggaggagaagcaggatgggagaatctgtgcgggaccctctcacagtggaatatccccacagcggctcaggccagacccaaaagcccctcagtgagccctccactgcagtcctgggcctgggtagcagcccctcccacagaggacagacccagcaccccgaagaagtcctgccagggggagctcagagccatgaaagagcaggatatggggtccccgatacaggcacagacctcagctccatccaggcccaccgggacccaccatgggaggaacacctgtctccgggttgtgaggtggctggcctctgtctcggaccccactccagacaccagacagaggggcaggccccccaaaaccagggttgagggatgatccgtcaaggcagacaagaccaaggggcactgaccccagcaagggaaggctcccaaacagacgaggaggtttctgaagctgtctgtatcacagtggggtatagcagtggctggtaccacagtgacactcgccaggccagaaaccccgtcccaagtcagcggaagcagagagagcagggaggacacgtttaggatctgaggccgcacctgacacccagggcagcagacgtctcccctccagggcaccctccaccgtcctgcgtttcttcaagaataggggcggcctgagggggtccagggccaggcgataggtcccctctaccccaaggaggagccaggcaggacccgagcaccgtccccattgaggctgacctgcccagacgggcctgggcccaccccacacaccggggcggaatgtgtgcaggccccagtctctgtgggtgttccgctagctggggcccccagtgctcaccccacacctaaagcgagccccagcctccagagccccctaagcattccccgcccagcagcccagcccctgcccccacccaggaggccccagagctcagggcgcctggtcggattctgaacagccccgagtcacagtgggtataactggaacgaccaccgtgagaaaaactgtgtccaaaactgactcctggcagcagtcggaggccccgccagagaggggagcagccgccctgaacccatgtcctgccggttcccatgacccccagcacccagagccccacggtgtccccgttggataatgaggacaagggctgggggctccggtggtttgcggcagggacttgatcacatccttctgctgtggccccattgcctctggctggagttgacccttctgacaagtgtcctcagaaagacagggatcaccggcacctcccaatatcaaccccaggcagcacagacacaaaccccacatccagagccaactccaggagcagagacaccccaacactctgggggaccccaaccgtgataactccccactggaatccgccccagagtctaccaggaccaaaggccctgccctgtctctgtccctcactcagggcctcctgcagggcgagcgcttgggagcagactcggtcttaggggacaccactgtgggccccaactttgatgaggccactgacccttccttcctttcctggggcagcacagactttggggtctgggcagggaagaactactggctggtggccaatcacagagcccccaggccgaggtggccccaagaaggccctcaggaggtggccactccacttcctcccagctggaccccaggtcctccccaagataggggtgccatccaaggcaggtcctccatggagcccccttcagactcctcccgggaccccactggacctcagtccctgctctgggaatgcagccaccacaagcacaccaggaagcccaggcccagccaccctgcagtgggcaagcccacactctggagcagagcagggtgcgtctgggaggggctaacctccccaccccccaccccccatctgcacacagccacctaccactgcccagaccctctgcaggagggccaagccaccatggggtatggacttagggtctcactcacgtgcctcccctcctgggagaaggggcctcatgccgagatccctgcagcactagacacagctggaggcagtggccccagggccaccctgacctggcatctaaggctgctccagcccagacagcactgccgttcctgggaagcctgggctccaccagaccacaggtccagggcacagcccacaggagccacccacacacagctcacaggaagaagataagctccagaccccagggcgggacctgccttcctgccaccacttacacacaggccagggagctgttcccacacagatcaaccccaaaccgggactgcctggcactagggtcactgccatttccctctccattccctcccagtgcctctgtgctccctccttctggggaacaccctgtgcagcccctccctgcagcccacacgctggggagaccccaccctgcctcgggccttttctacctgctgcacttgccgcccacccaaacaaccctgggtacgtgaccctgcagtcctcaccctgatctgcaaccagacccctgtccctccctctaaacacccctcccaggccaactctgcacctgcaggccctccgctcttctgccacaagagcctcaggttttcctacctgtgcccaccccctaacccctcctgcccacaacttgagttcttcctctcctggagcccttgagccatggcactgaccctacactcccacccacacactgcccatgccatcaccttcctcctggacactctgaccacgctcccctccctctcagacccggccctggtatttccaggacaaaggctcacccaagtcttccccatgcaggcccttgccctcactgcctggttacacgggagcctcctgtgcgcagaagcagggagctcagctcttccacaggcagaaggcactgaaagaaatcggcctccagtgccttgacacacgtccgcctgtgtctctcactgcctgcacctgcagggaggctccgcactccctctaaagatgagggatccaggcagcaacatcacgggagaatgcagggctcccagacagcccagccctctcgcaggcctctcctgggaagagacctgcagccaccactgaacagccacggaggtcgctggatagtaaccgagtcagtgaccgacctggagggcaggggagcagtgaaccggagcccagaccatagggacagagaccagccgctaacatcccgagcccctcactggcggccccagaacaccccgtggaaacagaacagacccacagtcccacctggaacagggcagacactgctgagcccccagcaccagccccaagaaacactaggcaacagcatcagagggggctcctgagaaagagaggaggggaggtctccttcaccatcaaatgcttcccttgaccaaaaacagggtccacgcaactcccccaggacaaaggaggagccccctgtacagcactgggctcagagtcctctctgagacaggctcagtttcagacaacaacccgctggaatgcacagtctcagcaggagagccaggccagagccagcaagaggagactcggtgacaccagtctcctgtagggacaggaggattttgtgggggttcgtgtcactgtgagcatattgtggtggtgactgctattcccacagtgacacaaccccattcctaaagccctactgcaaacgcacccactcctggggctgaggggctgggggagcatctgggaagtatggcctaggggtgtccatcaatgcccaaaatgcaccagactctccccaagacatcaccccaccagccagtgagcagagtaaacagaaaatgagaagcagctgggaagcttgcacaggccccaaggaaagagctttggcaggtgtgcaagaggggatgtgggcagagcctgagcagggccttttgctgtttctgctttcctgtgcagagagttccataaactggtattcaggatcaatggctgggagtgagcccaggaggacagtgtgggaagagcacagggaaggaggagcagccgctatcctacactgtcatcttttgaaagtttgccctgtgcccacaatgctgcatcatgggatgcttaacagctgatgtagacacagctaaagagagaatcagtgaaatgcatttgcagcacagatctgaataaatcctccagaatgtggagcagcacagaagcaagcacacagaaagtgcctgatgccaaggcaaagttcagtgggcaccttcaggcattgctgctgggcacagacactctgaaaagcactggcaggaactgcctgtgacaaagcagaaccctcaggcaatgccagccctagagcccttcctgagaacctcatgggcaaagatgtgcagaacagctgtttgtcatagccccaaactatggggctggacaaagcaaacgtccatctgaaggacaacagacaaataaacgatggcaggttcatgaaatgcaaactaggacagccagaggacaacagtagagagctacaggcggctttgcggttgagttcatgacaatgctgagtaattggagtaacagaggaaagcccaaaaaatacttttaatgtgatttcttctaaataaaatttacacccggcaaaatgaactatcttcttaagggataaactttcccctggaaaaactataaggaaaatcaagaaaacgatgatcacataaacacagtggtggttacttctactggggaaggaagagggtatgagctgagacacacagagtcggcaagtctcctaacaagaacagaacaaatacattacagtaccttgaaaacagcagttaaacttctaaatcgcaagaagaggaaaatgcacacacctgtgtttagaaaattctcagtccagcactgttcataatagcaaagacattaacccaggttggataaataagcgatgacacaggcaattgcacaatgatacagacatacattcagtatatgagacatcgatgatgtatccccaaagaaatgactttaaagagaaaaggcctgatgtgtggtggcaatcacctccctgggcatccccggacaggctgcaggctcactgtgtggcagggcaggcaggcacctgctggcagctcctggggcctgatgtggagcaggcacagagctgtatatccccaaggaaggtacagtcagtgcattccagagagaagcaactcagccacactccctggccagaacccaagatgcacacccatgcacagggaggcagagcccagcacctccgcagccaccaccacctgcgcacgggccaccaccttgcaggcacagagtgggtgctgagaggaggggcagggacaccaggcagggtgagcacccagagaaaactgcagaagcctcacacatccacctcagcctcccctgacctggacctcacctggcctgggcctcacctgacctggacctcacctggcctgggcttcacctggcctgggcttcacctgacctggacctcacctggcctcgggcctcacctggcctgggcttcacctggcctgggcttcacctgacctggacctcacctggcctgggcctcacctgacctggacctcacctggcctgggcttcacctggcctgggcttcacctggcctgggcttcacctgacctggacctcacctggcctgggcttcacctgacctggacctcacctggcctcgggcctcacctgcacctgctccaggtcttgctggagcctgagtagcactgaggctgtagggactcatccagggttggggaatgactctgcaactctcccacatctgacctttctgggtggaggcacctggtggcccagggaatataaaaagccccagaatgatgcctgtgtgatttgggggcaatttatgaacccgaaaggacatggccatggggtgggtagggacagtagggacagatgtcagcctgaggtgaagcctcaggacacaggtgggcatggacagtgtccacctaagcgagggacagacccgagtgtccctgcagtagacctgagagcgctgggcccacagcctcccctcggggccctgctgcctcctcaggtcagccctggacatcccgggtttccccaggcctggcggtaggtttgaagtgaggtctgtgtcactgtggtattactatgatagtagtggttattactaccacagtgtcacagagtccatcaaaaactcatgcctgggagcctcccaccacagccctccctgcgggggaccgctgcatgccgtgttaggattttgatcgaggacacggcgccatgggtatggtggctaccacagcagtgcagcccatgacccaaacacacggggcagcagaaacaatggacaggcccacaagtgaccatgatgggctccagcccaccagccccagagaccatgaaacagatggccaaggtcaccctacaggtcatccagatctggctccaaggggtctgcatcgctgctgccctcccaacgccaaaccagatggagacagggccggccccatagcaccatctgctgccgtccacccagcagtcccggaagcccctccctgaacgctgggccacgtgtgtgaaccctgcgagccccccatgtcagagtaggggcagcaggagggcggggctggccctgtgcactgtcactgcccctgtggtccctggcctgcctggccctgacacctgagcctctcctgggtcatttccaagacattcccagggacagccggagctgggagtcgctcatcctgcctggctgtcctgagtcctgctcatttccagacctcaccagggaagccaacagaggactcacctcacacagtcagagacaacgaaccttccagaaatccctgtttctctccccagtgagagaaaccctcttccagggtttctcttctctcccaccctcttccaggacagtcctcagcagcatcacagcgggaacgcacatctggatcaggacggcccccagaacacgcgatggcccatggggacagcccagcccttcccagacccctaaaaggtatccccaccttgcacctgccccagggctcaaactccaggaggcctgactcctgcacaccctcctgccagatatcacctcagccccctcctggaggggacaggagcccgggagggtgagtcagacccacctgccctcaatggcaggcggggaagattcagaaaggcctgagatccccaggacgcagcaccactgtcaatgggggccccagacgcctggaccagggcctgtgtgggaaaggcctctggccacactcaggggctttttgtgaagggccctcctgctgtgtgactacggtggtaactcccacagtgatgaaaccagcagcaaaaactgactggactcgcagggtttatgcacacttctcggctcggagctctccaggagcacaagagccaggcccgagggtttctgcccagaccctcggcctctagggacacccgggccatcttagccgatgggctggtgccctgcacaccgtgtgctgccaaacaggggcttcagagggctctgaggtgacttcactcatgaccacaggtgccctggtcccttcactgccagctgcaccagaccctgttccgagagatgccccagttccaaaagccaattcctggggccgggaattactgtagacaccagcctcattccagtacctcctgccaattgcctggattcccatcctggctggaatcaagagggcagcatccgccaggctcccaacaggcaggactcccacacaccctcctctgagaggccgctgtgttccgcagggccaggccgcagacagttcccctcacctgcccatgtagaaacacctgccattgtcgtccccacctggcaaagaccacttgtggagcccccagccccaggtacagctgtagagagagtcctcgaggcccctaagaaggagccatgcccagttctgccgggaccctcggccaggccgacaggagtggacgctggagctgggcccacactgggccacataggagctcaccagtgagggcaggagagcacatgccggggagcacccagcctcctgctgaccagagacccgtcccagagcccaggaggctgcagaggcctctccagggggacacagtgcatgtctggtccctgagcagcccccaggctctctagcactgggggcccctggcacagctgtctggaccctccctgttccctgggaagctcctcctgacagccccgcctccagttccaggtgtggttattgtcagggggtgccaggccgtggtagagatggctacaattaccacagtggtgccgcccatagcagcaaccaggccaagtagacagacccctgccacgcagccccaggcctccagctcacctgcttctcctggggctctcaaggctgctgtctgccctctggccctctgtggggagggttccctcagtgggaggtctgtgctccagggcagggatgactgagatagaaatcaaaggctggcagggaaaggcagcttcccgccctgagaggtgcaggcagcaccacagagccatggagtcacagagccacggagcccccagtgtgggcgtgtgagggtgctgggctcccggcaggcccagccctgatggggaagcctgccccgtcccacagcccaggtccccaggggcagcaggcacagaagctgccaagctgtgctctacgatcctcatccctccagcagcatccactccacagtggggaaactgagccttggagaaccacccagccccctggaaacaaggcggggagcccagacagtgggcccagagcactgtgtgtatcctggcactaggtgcagggaccacccggagatccccatcactgagtggccagcctgcagaaggacccaaccccaaccaggccgcttgattaagctccatccccctgtcctgggaacctcttcccagcgccaccaacagctcggcttcccaggccctcatccctccaaggaaggccaaaggctgggcctgccaggggcacagtaccctctcttgccctggctaagacagggtgggcagacggctgcagataggacatattgctggggcatcttgctctgtgactactgggtactggctctcaacgcagaccctaccaaaatccccactgcctcccctgctaggggctggcctggtctcctcctgctgtcctaggaggctgctgacctccaggatggcttctgtccccagttctagggccagagcagatcccaggcaggctgtaggctgggaggccacccctgtccttgccgaggttcagtgcaggcacccaggacaggaaatggcctgaacacagggatgactgtgccatgccctacctaagtccgcccctttctactctgcaacccccactccccaggtcagcccatgacgaccaacaacccaacaccagagtcactgcctggccctgccctggggaggacccctcagcccccaccctgtctagaggagttggggggacaggacacaggccctctccttatggttcccccacctggctcctgccgggacccttggggtgtggacagaaaggacgcctgcctaattgtcccccaggaacccagaacttctctccagggaccccagcccgagcacccccttacccaggacccagccctgcccctcctcccctctgctctcctctcatcactccatgggaatccagaatccccaggaagccatcaggaagggctgaaggaggaagcggggccactgcaccaccgggcaggaggctccgtcttcgtgaacccagggaagtgccagcctcctagagggtatggtccaccctgcctggggctcccaccgtggcaggctgcggggaaggaccagggacggtgtgggggagggctcagggccctgcaggtgctccatcttggatgagcccatccctctcatccaccgacccgcccacctcctctccaccctggccacacgtcgtccacaccatcctgagtcccacctacaccagagccggcagagccagtgcagacagaggctggggtgcaggggggccgccagggcagctttggggagggaggaatggaggaaggggaggtcagtgaagaggcccccctcccctgggtctaggatccacctttgggacccccggatcccatcccctccaggctctgggaggagaagcaggatgggagaatctgtgcgggaccctctcacagtggaatacctccacagcggctcaggccagatacaaaagcccctcagtgagccctccactgcagtgctgggcctgggggcagcccctcccacagaggacagacccagcaccccgaagaagtcctgccagggggagctcagagccatgaaggagcaagatatggggaccccaatactggcacagacctcagctccatccaggcccaccaggacccaccatgggtggaacacctgtctccggcccctgctggctgtgaggcagctggcctctgtctcggacccccattccagacaccagacagagggacaggccccccagaaccagtgttgagggacacccctgtccagggcagccaagtccaagaggcgcgctgagcccagcaatggaaggcccccaaacaaaccaggaggtttctgaagctgtctgtgtcacagtcgggtatagcagcggctaccacaatgacactgggcaggacagaaaccccatcccaagtcagccgaaggcagagagagcaggcaggacacatttaggatctgaggccacacctgacactcaagccaacagatgtctcccctccagggcgccctgccctgttcagtgttcctgagaaaacaggggcagcctgaggggatccagggccaggagatgggtcccctctaccccgaggaggagccaggcgggaatcccagccccctccccattgaggccatcctgcccagaggggcccggacccaccccacacacccaggcagaatgtgtgcaggcttcaggctctgtgggtgccgctagctggggctgccagtcctcaccccacacctaaggtgagccacagccgccagagcctccacaggagaccccacccagcagcccagcccctacccaggaggccccagagctcagggcgcctgggtggattctgaacagccccgagtcacggtgggtatagtgggagctactaccactgtgagaaaagctatgtccaaaactgtctcccggccactgctggaggcccagccagagaagggaccagccgcccgaacatacgaccttcccagccctcatgacccccagcacttggagctccacagtgtccccattggatggtgaggatgggggccggggccatctgcacctcccaacatcacccccaggcagcacaggcacaaaccccaaatccagagccgacaccaggaacacagacaccccaataccctgggggaccctggccctggtgacttcccactgggatccacccccgtgtccacctggatcaaagaccccaccgctgtctctgtccctcactcagggcctgctgaggggcgggtgctttggagcagactcaggtttaggggccaccattgtggggcccaacctcgaccaggacacagatttttctttcctgccctggggcaacacagactttggggtctgtgcagggaggaccttctggaaagtcaccaagcacagagccctgactgaggtggtctcaggaagacccccaggagggggcttgtgccccttcctctcatgtggaccccatgccccccaagataggggcatcatgcagggcaggtcctccatgcagccaccactaggcaactccctggcgccggtccccactgcgcctccatcccggctctggggatgcagccaccatggccacaccaggcagcccgggtccagcaaccctgcagtgcccaagcccttggcaggattcccagaggctggagcccacccctcctcatccccccacacctgcacacacacacctaccccctgcccagtccccctccaggagggttggagccgcccatagggtgggggctccaggtctcactcactcgcttcccttcctgggcaaaggagcctcgtgccccggtcccccctgacggcgctgggcacaggtgtgggtactgggccccagggctcctccagccccagctgccctgctctccctgggaggcctgggcaccaccagaccaccagtccagggcacagccccagggagccgcccactgccagctcacaggaagaagataagcttcagaccctcagggccgggagctgccttcctgccaccccttcctgccccagacctccatgccctcccccaaccacttacacacaagccagggagctgtttccacacagttcaaccccaaaccaggacggcctggcactcgggtcactgccatttctgtctgcattcgctcccagcgcccctgtgttccctccctcctccctccttcctttcttcctgcattgggttcatgccgcagagtgccaggtgcaggtcagccctgagcttggggtcacctcctcactgaaggcagcctcagggtgcccaggggcaggcagggtgggggtgaggcttccagctccaaccgctccactagccgagactaaggaagtgagaggcagccagaaatccagaccattccatagcaaatggatttcattaaagttaccagacttcagtgtaagtaacatgagccccatgcacaacaatcccttatgaaggggaagtcagtgtcgcctcggatttcttgaaaaacacaaaaacttatcaatgcctgtaaaagtctgttggaaagaaaatatgattcaagaatgttatgcccaacaaagctggcatattttctacccggacacactcagggaatgtggtcgcttgagtgcttctctcactgcgtaaatcctacgtggtgtttaagcatattcataaatgtgtatgtctatttttatgtgtaagatggttcatttttattttatttattcaatatgtacaataaagaatattgacaaataggctggacatggtggctcccacctgtaatcccagccctttgggaggccgaggcgggcagatcacctgaggtctggagttcgagaccagcctggccaacatgatgaaaacccatctctactaaaaatacaaagattagccaggcatggtggtgcatgcctgtaatcccagccactcaggaggctgagacaggagaaatgcgtgaacccggaaggcggaggttgcagtgagccgagatcacaccactgcactccagcctggcgacagagcaagattccatctcaaaaaaaaaagacaaagaaatttgtttttttgaataaagacaaatttcatcacacgaagataaagatgcaaagctccagacaggaaggcacggacagcacagtgaagcctggagcgggcgctggggggccaggggcatggcgggggtgccagcgtctctcagtgcctaccatggccactccagcctgtgttctcacgaggatggctgtgcaatgctaggagcgtgttcgaagctctagggcaaccactggaagtgaggctgaggagcagagcccagaggcccgtggagctgatgaaaagaaagctggagaaagtgtttgctgcctcccaacatggtaagaaaagatagaaagagagagcacacggcaaagggagcttgctgagggactctttacaatggcttgcacagagctcagggggtctgggaggctagggccctgcgcagggcagtcaccccagcctgctgaccaaggtttgctgcaggcagctctgggggtggttgaggcgcggtccctggagccacccctcaagggaacgaggcagcagagtgggccaaggcccaggtcggctgcaaggctgcccaggacttggggtccttacatcagcagccactgatgcagctggcccagagagaggcgccgagcaggttgcctccaggggacaaaccaggtcggagagggtgaggcagtggatggagccacaacaaccccgggcacgggtgacacgcacgttcatgcacatctgacccttcctccctcaccaaacaggtccccctgccttccccatggttgcgaaaaagcaaaatgtagacgttttttcttttttaattcatgttttaattgacaaatgaagccgtatatatttattgtgtacaacatgatgctttaaaatatgtatacatcgtggaacagcaacgtcgagctaatttaacacgcattacttcacatacttgtcatcttttgtggcgagaatgcttaaaatccactctcttagtattttttaagaatgcaatacattgttgtcaactgtggtcaccgtcatgcatagccaagctcccgacctcaccctcctgccagctcaggctgtgcatcctttcaccagcatcccccaccccggcccctggccctggtaactaccactctatactctacgtatgagttcagctttttaagattccacagatgaatgagatcatacagtatttgctttctatgcctggcttattttagttaacacactgtcctccagatccatccgttgttgcaaatgacagggtttcattctttttaaagtctaaagagtattccattgtgtcaatggacctcatttgctttatccatgcatcaactatggacatttaggttgattccatttcttagctgttgtggatggtgctgcagtaaacatggggctgcagatgtctcttcaacatactgacatcatgtcctttggataaatacccagtagtgggatcgctggatcacaatgtacagttttttttttaatggaaactttcattttttggtgaaattaggaaaacagataaaacccacagaatccaaaatatatgtgaagatgccaaaaacagttgacattgggcagaggtcacatggaaggaagtgaatacatgacggggtgtgagggcccagaggcagctgaaatacgctttctaaacacaaggacctcttctgagagggcagaagttttatcctgcacatgcaatgaccagcacagctaaaatacactttctaaacatgaggacctcttctgagagggcagctttatcctgcaaatgcaatgaccagcacaggacccagaataaagagagttgccagcggacgcctggtgtccatgtgtccaggtgagttcgagatgcggacggcgctggccagccagtcacaccctaagtcaatctgctgcatgcatttgtccttgccacagcagaaaacgagaaagcctttgggctgcaaagcttcacaggctcctcttctcccgactccatggaaacagctacaaagagcaggcccagtagagcttaattcatgaaaatgagtaataaacttgaactggaacagtatcgactttttagaaacggcagcaaagtgtataaaaaatattcaccagaacaatatttccaaacgatgagatgagaatttcagccaagtaatcctccatggatagaaaataatgaagggattggatttatgaaggaaaatcatggagctcaaatacaagagaagagaatcaaaaatgaacaggaggagataaaatatggtttggccaaagttacaaaataaattttttaaaaacccttcatcatggcaagtagaaagagcgagaggaaaaacagatcccgtggaagacacaaataggacatggggagaaaaatgaatgagatgaaacagagcagaaataaaattttacggaactaaagacaagtgatctgaacctgcctggggcctgggggacctcgccaccctgaagggaaagaacatgcctggctggctttgccacctgctcattgcagagccccacagcttgcaacaaacataggcggtagccagggagtggttacagcaggccttgagcaagacccagtgttgtgctgacttcaggtctgacccagcactgtcatagtggtggtgtccatagtggtagtgggggtgcttgtgtcactccacccccatctccaggaggctcagaacagacagagagagactccatttgtttgggagaaagtaagggatgagaacaagagtctctgcctggtaatccagagaattattctagatcttggccaagattatcaaagcagtacctctatgagtcttttgggcttggagtccccctaaagcagatatagctaagatcacaacacccaagtccttttgaatatgtgggaagacttcccaaggacaggagcaaacaaacaagcccagactgcaaaaaaacaagcccagactgcaataaacacctcactcttcaatgcccaggcactgaagaacatctcctagcagcaacaccatccaggaaaacatggcctcaaccagtgaactaaataaggcaccagggaccagtctcggagaaatagaggtatgttatctttcagagaattcaaagtagctttgttgaggaaactcaaagaaattcaagataacacagtgaaggaattcagaatcctatccgataaatttaacagagattgaagcaattaaaaagaattaagcagaaattatggagctgaaaaatgcaattggcatactgaaaaatgcatcagagtattttcatagcctcatatatcaagtagaagaaagaattagtgagcttgaaaacaggctatttggaaaagcacgataaaaggagacaaaagagaaaagaataaataacaatgaagcatatctacaggatctagaaaatagcctcaaaaggccaaatctaagaattattagccttaaagaggaggtagagaaagagggatggagagtttattcaaagggataataacagaaaacttcccaaacctagagaaagatatcaatatccaaatgcaagaaggatgtagtacaccaaggagatttaatgcaaagaagactacctcaaggcattcaatactcaaactcccatatgacaaggactttaaaaagatcctaaaagcagcaaaagaaaagaaatgaataaaatactatggagctccaatatgtctggcagcagacttttcagtgaagactttatatgccaggagagagtgtcataatggatttaaagtgctgaaggaaaaaacttttaccctcgaacagtatagctggtgaaattatccttcaaacatgaaggagaaataatttgtttccagacaaatgttgagggatttcatgaacaccagacctgtcttttaagaaatgctaaagggagtacttcaatcagaaagaaacacgttagtgaacaataagaaatcatctgaaggcacaaaactcaccggtaatagtaagtacacagaaaaacacagaatattataacactgtaactgtggtgtgtaaactccttttgtttgtttgtttgtttgtttgtttgtttgtttttgtttttagacggagttttgctccagcccaggctggagtgcaatggcacaatctcagctcactgcaacttccacctcctgggttcaagcaattctcctgcctcagcctcccaagtagctgggattacaggcatgtgctaccatgtccagctaattttgtattttagtagagacggtgtttcaccatgttggtcaggctagccttatcttgagtagaaaaactaaatgatgaagcaatgaaaaataataactacaacttttcaagacatagtacaataagatataaatcataacaaaaagttaaaaggtggagggatgaagttaaggcatagagtctttattagttttctttttacttgtctgtttatgcaaacagtgttaagttgtcatcagtttaaaataatgggtcataagatactatttgcaagcctcatggtaacgtcaaaccaaaagcaatacaacagatacacaaaaaacaaaaagcaagaagctaaattacgtcatcagagaaaatcaccttcactaaaaggaagacggagaaaagaatgaagagagagaagaccaaaagcaaatagcaatatggcaggagtaagtccttacttatcaataataccattgaatgtaaatggactaaactctccaatcaaaagacatagagtggctgaatcaattaaagaaaaaacaagacccattgatctgttgtccacaagaaacacactttatctataaagacacacatagactgaaaacaaagggatggaaaaagatactccacgccaatggaaaccaaagaaagagcaggagtagctacacttatatcaggcaaaatagatttcaagacaaaaactataagaagagacaaggtcactaatgataaacaggtcaattcagcaagaggatataacaattgtaaatatatatgcacccaatgctggagcacccagatatataaagcaagtatttactagagctaaagagagaaatagactccaatgcaataatagctggagatttcaacatcccactttcaacattgaacagatcctccagatagaaaatcaacaaagaaatattggacttaatctgcactatcgaccaaatggatctaacagatatttacagaacatttcatccaacagctgcagaacacacattcttttcctcagcacatagatcattctcaaggatagaccatatgttgggtcacaaaacaagttttaaaatattcaaatacattgaaataatatcaagcatcttctgtgaccacaatggactaaaactagaaatcaataacaagaggaattttggaaactatataaatatatggaaattaatgaatgctgagtgggtcaatgaagcaattaagaaggaaactgaaatttttcttggaacgaatgatcatggaaacagaaaataccaaaacctatgggatacagcaaaagcagtactaagagggaagtttacagctacaaatgcttacattaaaaaagaagaaaaacttcaataaaaaaacctaacaatgcatcttaaagaactagaaaagcaagaggaaatcaaatccaaaattagtagaagaaaacagtaaaggtcagagcagaaataagtaaaattgaaatgaagaaaacaatacaaaagatcaataaaacaacaggttgttttcttgaaaagttaaacaaaattgacaaacctttagccagactaagaaaaaaagacagaagatccaaataaataaaatcagagatgaaaaaggtgacattacaacttacaccacagaaattcaaaggatcattagtggctactataagcaactatatgccaataaattggaaaatctagaagaaatgcagaaattcctagacacatacaacctcccaagattaaaccaagaagaaattcaaaacctgaacagactgataacaagtaatgagatcaaagccgtaataaaaagcctcccagtaaagagaagcccaggacccgacggcttcactgctgaattctaccaaacatttaaagtagaactaataccaatcctactcaaactattccaaaaaatagaggtggaaggaatacttcaaaactcattatacgaggccagtattaacctgacaccaaaactagacaaagacacatgaaaaaaagaaaactacaggccaatatgtctgatgaatattgacacaaaaatcctcaacaaaatactagcaaaccaaattcaactacacattagaaagttcactcatcatgaccaagtggaatttatctaacttgggatgcaaagatggttcaacatatgcaaatcaatcaatgtgatacatcatatcaacagaatgaacaacaaaaaccatttgatcatttaattgatactgaaaaagcatttgataaaattcaacattccttcataataaaaattctcttctatactaggtacaaaagaaacttacctcaacataataaagccatatatgacagtcccacagtatgatactaaatgaggaaaaactgagagcctttcctctacgatctggaacatgacaaagatgcccactttcatcactgttattcaacatagtactggaagtcctagctggagcgatcagacaagagaaagatataaaaggcatccaaattggaaaggaataagtcaaattatcctcatttgcatatggtatgatcttctatttagagctaactaaagactccaccaaaaaaagttattagaactgacgaacaaattcagtaaagctgcaggatacaaaatcaacatacaaaaatcagtagcatttctatatgccaacaatgaccaatgtgaaaaagaaattaaaaagtaaccctatttacaataaccacaaataaacacctaggaattaaccaaagaggtaaaagatttctgtaatgaaaactataaaacactgatgaaagaaattgaagagtacaccaaaaaatggaaagcaattgcatgttcatggattagaagaatcagtgttgttataatgtccatactatccaaagcaatctacagattcaatgcaatccttatcaaaataccaatgacatcattcacagaaatagaaaaaaaaaatcctaaaatttacgtggaaccacaaagacccagaatagccaaagctctcctaagcaaaaagaacgaaactgtaggaatgacattgcctgtcttcaaattctactacagagctatagatagtaaccaaaacagcgtggtactagcataaaaacagacacagagacaaacagaacaaaatttaaaaacccagaaataaatccacacacctacagcaaattcatttttgacaaagttgccaagaacatactctggggaatagataatgatatctcttcaataaataatgtggggaaaactggatatccatatacataacagtgaaactagacccctctctctctcactatatacaaaaatcaaatcaaaattgtttaaggacttaaatctaagacctcatactatgaaaccactgcaagacaaccttggcggaaactctccaagacatcagtccaggcaaagatttcttgagtaatatcccacaagcacagacaaccaaagcaaaaatggacaaatgggatcacatcaagttaaaaagcttctgcacagtaagggaaacaaccaacaaaatgaagagacaacccacagaatgggagaaaatatttgaaaaatacccatctggcaagggattaaaaaccagaatatatgcagaatatataaggagctcaaacagtgctatagaaaaaaaaatctaataatctgatttaaaaatgggaaaaatgttagaatagacatttcttaaaataagacatacagatggcaaaccgacatggaacggtgctcaacatcatggattatcacagaaacacaatcaatcaaaactaaaactaaaatgtgctatcatctcaccccagttaaaatggctgatatccagaagacaggcaataacaaatgctggcaaggatgtggggaaaagggagcccccatacactgttgctgggattgtaaattagtacaaccactgtggagagcagcatgaaagttcctcaaaaaactgaaagaaagctaccataggatccagcaatcccactgctgtgtatatactacaaaagaaaggaagtcagtatatgaagaggtatctgcactcccatgtttgttgcagccctgttcacaacagccaagatttggaagcaacctaagtgtccatcagcagttgaatgtataaagaaaatgtggtgcatatacacaatggagtattattcaataataaaaaggaatgagattgagtcatttgcaacaacatggatggaactggagatcattatgtgaagtgaaataagccaggcacagaaagacaaacattacaatgttcttacttattaatgagatctaaaaatcaaaacaattgcacccatgttcataaagagtaaaaggatggttaccagatgctgagaacggtggtggggggatagggaaaggtggcagtggttaacgggtacaaaaaaatagaaagaatgaataagacttactacttgatagcacagcaaggtggctatagtcagtaatttagttgtatatttttaataatgaaaggtgtataattggattgtttctaacacaaaggataatgcttaagaggatggataccccattttccatgatgtgattatttcacattgcacgcctagatcaaaacatccaatgtaccccataaatatatacatcttctatgtacccataaaaattctgtaaaataaaatatataaaaagaggtgacagatatggaagacaggcaaagaagagacgacatccacataatccgagtacctaagaaagaatggagtccagtgcatctcaggagccaccattctaagccaattttctctggttctctcagtcaccctaccaatacgtgggcaatcttgttttatttcaggatagagtttttgaaattatagatttaagtatgctttctgttctattacttttggtaattaattttagaaagaactaatttgggcacaaatttgaaaaaattctaaatccaaaaaaaaaaagaaaaaaacacacacacaatcatctataagggggatgatgaccagtcctagatttctcaccagccacattcaagatcagtaaatggtaggacaaaacctgtagggtccttaagggggaaagaagtagtggatagtccagagtctatatacagccaactgttcttgaagaaaaaaggctgctgaaaaggagttccaaacattctataatccataatctcatgatgaaactactagaggaagaccaccagccatcaaaaggtgcttggagaacccagggccaagaaccaaaagtaaatattaagtgtccttaactgcgagactaagatagaaatgactgtgggggaccatgtggcctcaacagaggtgaaatggtgtctgcctgacaaagtggacattttacaatgatcaaaacacagaatatgagatagagagcacttctgaattactgcctcactccaaataactctcagccaaaggacttcagtaaaaccaaattgggcatattagacagtacaaacaaattctaagaaaataatattactgattacaatcacatgatgctagagatggaggggaaaaggaagaggaaaccaggtaatttcatactcgtatatagtaaagaactaaagtacattgtccaaagaagaacaaagaatattttggaaagttataaaggtagccactacacatagaagatagcaaagaacaagaaaacttaagatggaaaactttttggaagcataaaaatagaaaatataaactactaagataagattgaagccaaacagatctatgaaaacaacaaacatcaatggccttaacttgcctattaaaaggaagagactttcaaattggaccacaagataaaacccaactctatatagcatatgagtattacacacaaaatgggaaaagctgaaaaaacttgggcaaaattcaccccaagcaaattccactgtttcctttgggacaaaatgccaagctccatgccagggaagatgattctcctcagaccttctcctcactctcccagtcctcttagggaaggaattgggtgttagaggagggagactctgtcgattatcagctgaagcagtggtgtgctcctgcgttgcttctgacctgggaaatgaagcagcaagactctttctgctgtgtctttgcccagaagggccatccccccagagcagagtacccaggccggcaggagcagtggtggaagcgtggaaaccacgtctcctacagcagagaccatcagaagcggagcctcgggtataagggaaacaacgcgttctccctaacctgggagtgacagacagcgtcattcctcacagtgataccctgtgttctagccatctggcccatgacagagccagcccagagccagcccagagccagcccctcaccaacctggagcctggccagctcgccaagctgcaccataggcctggaaggcgtggagacctgcggcagtgccctgtcctcccgtgaggcctgccatccctgccaggggtcgcctctggcttctccttctccaggaccgcacggtccagaggctcagtgcctggagtaggtgttgcccccctgcttctaggcccagaccctcccttgttcctgaccccgggcctttccctctggcttggacatccagggccctgtctcagctggggagctgctcctgctcaaggactgtcttccgcgggatcgaaaggccgcgtcctgaacaatgcgtgggccacgtgagcggagcaggctctaaaggccgcgtcctaaacagtgcgtgggccacgtgagcggagcaggctctaaaggccgcgtcctaaacagtgcgtgggccacgtgagcggagcaggctctaaaggccgcgtcctaaacagtgcgtgggccacgtgagcggagcaggctctaaaggccgcgtcctaaacagtgcgtgggccacgtgagcggagcaggctctaaaggccgcgtcctaaacagcgcgtgggccacgtgagcggagcaggctctaaaggccgcgtcctaaacagtgcgtgggccacgggagcggagcagactctaaaggccgcgtcctaaacagtgtgtgggccacgtgagcggagcgccctctccactgccctcggggccgcagctcccagctcagctcccagccctgctcagggcagccaggccaggaggtaccatccaggctaagtgaccctcaggggggacaggtgccccaggagatgccagctgttgggagaggctgggggaccaactcgacctggcctgtgggccctgccctggccacccattgtaggatccagccgccacgcctgtgacactcgtgtgctttccctggtgtgtgcttgtggcaggtgggggcagagggtcctcaggccagagagccactcccccagcgccagaccaccctcttcctcactcccccacctcaccccctcacaggtgcctcccaggccatcagggcccaaccacccctaaacaaatgggttctcggcccctcgtggctggaggtgggttctctcaccattcccagcctaagactccatccccatgctggcagctgttcaaccatgtctagagagatccactgtcccagacagcacctcagggtcccccgtcctgcctggaaccctgtaggaaactccacaaaccgccgccattctgtccacacccctacaggagccccaaccctctccccacatccaggcttccctcccagacccctcatccctgcccgcacggtgcctgagggggccttcttgggcagcgcctaagcaagcccccagcacccttcggccccttcaaggcacacaggccccctttccacccagcctcaggaaaccacctgtgtcctccaacgacaggtcccagcctcccagcctttgccttgcctgttcctctccctggaactctgccccgacacagaccctccccagcaagcccgcagggcacctcccctgcccccagacaccctgtgcccatcagttcatccccagcagaggccctcaccaggcacacccccatgctcacacctggccgcaggcctcagcctccctgagggccccacccagcccgcgtctggccagtggtgcgtgcaaagcccctcacccagactcggcggaaggcagccagtgcaggcctggggaggggctctccttagaccaccttgcaccttccctggcacccaccatgggaagagctgagactcactgaggaccagctgaggctcagagaagggacccagcactggtggacacgcagggagcccacgccagggcgccgtggtgagtgaggcccagtgccacccactgaggcctcccgttcagtgggacgacggtgaacaggtggaaccaaccaggcaacccccgccgggccccacagacgggatcagagcaggaaaggcttcctgcccctgcaggccagcgaggagccctggcgggggccgtggccctccaggcgaggaggctcccctggccaccgccacccgggcctctctgctgctgggaaaacaagtcagaaagcaagtggatgagaggtggcgtgacagacccagcttcagatctgctctaatttacaaaagaaaaggaaaaacacacttggcagccttcagcactctaatgattcttaacagcagcaaattattggcacaagactccagagtgactggcagggttgagggctggggtctcccacgtgttttggggctaacagcggaagggagagcactggcaaaggtgctgggggcccctggacccgacccgccctggagaccgcagccacatcagcccccagccccacaggccccctaccagccgcagggttttggctgagctgagaaccactgtgctaactggggacacagtgattggcagctctacaaaaaccatgctcccccgggaccccgggctgtgggtttctgtagcccctggctcagggctgactcaccgtggctgaatacttccagcactggggccagggcaccctggtcaccgtctcctcaggtgagtctgctgtctggggatagcggggagccaggtgtactgggccaggcaagggctttggcttcagacttggggacaggtgctcagcaaaggaggtcggcaggagggcggagggtgtgtttttgtatgggagaagcaggagggcagaggctgtgctactggtacttcgatctctggggccgtggcaccctggtcactgtctcctcaggtgagtcccactgcagccccctcccagtcttctctgtccaggcaccaggccaggtatctggggtctgcagccggcctgggtctggcctgaggccacaccagctgccatccctggggtctccgccatgggctgcatgccagagccctgctgtcacttagccctggggccagctggagcccccaaggacaggcagggaccccgctgggcttcagccccgtcagggaccctccacaggtagcaagcaggccgagggcagggacgggaaggagaagttgtgggcagagcctgggctggggctgggcgctggctgttcatgtgccggggaccaggcctgcgctttagtgtggctacaagtgcttggagcactggggccagggcagcccggccaccgtctccctgggaacgtcacccctccctgcctgggtctcagcccgggggtctgtgtggctggggacagggacgccggctgcctctgctctgtgcttgggccatgtgacccattcgagtgtcctgcacgggcacaggtttgtgtctgggcaggaacagggactgtgtccctgtgtgatgcttttgatatctggggccaagggacaatggtcaccgtctcttcaggtaagatggctttccttctgcctcctttctctgggcccagcgtcctctgtcctggagctgggagataatgtccgggggctccttggtctgcgctgggccatgtggggccctccggggctccttctccggctgtttgggaccacgttcagcagaaggcctttctttgggaactgggactctgctgctggggcaaagggtgggcagagtcatgcttgtgctggggacaaaatgaccttgggacacggggctggctgccacggccggcccgggacagtcggagagtcaggtttttgtgcaccccttaatggggcctcccacaatgtgactactttgactactggggccagggaaccctggtcaccgtctcctcaggtgagtcctcacaacctctctcctgctttaactctgaagggttttgctgcatttctggggggaaataagggtgctgggtctcctgccaagagagccccggagcatcctggggggctcaggaggatgccctgaggcaacagcggccacacagacgaggggcaagggctccagatgctccttcctcctgagcccagcagcacgggtctctctgtggccagggccaccctaggcctctggggtccaatgcccaacaacccccgggccctccccgggctcagtctgagagggtcccagggacgtagcggggcgccagttcttgcctggggtcctggcattgttgtcacaatgtgacaactggttcgacccctggggccagggaaccctggtcaccgtctcctcaggtgagtcctcaccaccccctctctgagtccacttagggagactcagcttgccagggtctcagggtcagagtcttggaggcattttggaggtcaggaaagaaagccggggagagggacccttcgaatgggaacccagcctgtcctccccaagtccggccacagatgtcggcagctggggggctccttcggctggtctggggtgacctctctccgcttcacctggagcattctcaggggctgtcgtgatgattgcgtggtgggactctgtcccgctccaaggcacccgctctctgggacgggtgccccccggggtttttggactcctgggggtgacttagcagccgtctgcttgcagttggacttcccaggccgacagtggtctggcttctgaggggtcaggccagaatgtggggtacgtgggaggccagcagagggttccatgagaagggcaggacagggccacggacagtcagcttccatgtgacgcccggagacagaaggtctctgggtggctgggtttttgtggggtgaggatggacattctgccattgtgattactactactactactacatggacgtctggggcaaagggaccacggtcaccgtctcctcaggtaagaatggcctctccaggtctttatttttaatctttgcctatggagttttcagagtattgcatactaaccccggagatgtgtcaagctggccgggagaagctagggactaaactgcctaggggatctcagagccttggggataaactaagaatctctttgatggtgttggtagagtccctaaatgatggagcagggattttggagcctcatttgagggagatgctaaaaagattccatggctaaagggatagtttgggctgtggttggagattttcagtatttagagtaatagtgttagctgagaaatataattcaggaccctctgagacagcatctgtacagtatctgatgcacagggacaaagagtggagtgggacactttcttcagatttgtgaggaatgttctgagtagattgtttaaaacatcatttgttgaaaagagaacttttagtgaatcaatcaaggaaggaaggaaggctcagtctcaaaagggtagctgatatccagaggaatctggataagcctgcaaaagtctagctttcaaaggaatgcagaagtatgcatgtggaaaattagaagatttttttttacccttaaagtggttcctatgatagttagaatactgtgactttactatgtgagagagttttcaagtattcacttttttttttaaatgtccaagtacgaaaaaattttgtcagtttgaagtcaggtttgtacagaattgatattgttgaaagtttaaccaaagaatgggaatgaggctctttcacaccctattcagaactgacttttgacaataataaattaagtttaaaatgtttttaaacaaattgagcaatgttgagttgcagtcaagatggccgatcaggaccaggacacctgcagcagctggcaggaagcaggtcatgtggcaaggctattttgggaagggaaaataaaaccactaggtaaacttctagttgtggtttgaagaagtggttttgaaatgctctgtccagccacgcagaactgaaagtccaggctgagaaaaacaacacctggataatttgcatttctaaaataagttgaggattcagtcgaaactggaaaggtcctcttttaacttagtgagttcaatcttttaattttagcttgagaagttctagtttccctcaaacttaagtttatcgacttctaaaatatattcattttcaaaattaagttatgtaaaaaaattgaaggacttcagtgtctttaatttctaatgtatttagaaaactttttaaagttactttattattcttccctctgattattggtctctgttcaattcttttcccagtacccaaagcatttacagtgactttgttcataattttttttaagttagttgttttctgccttactattaagactttagcattctggtcgaagtggcttcataaatctttttcaaggccactttttaggagaaagacatcttttttttaatgaatgcaattatctagaattatttcagttaaacatgttagttggtggttgagaggacactcagtcagtgcagaaggtctgtaagccagtccacagagacattcctgggtgaactccctctggccctgcttcttgttggagaactggccagaggtctgagaccaggctgctgctgggaaggcctggactttggtctcccagtaccgcccagacctggggatgtatggttgtggcttctgccacccatccacctggctgctcatgaaccagccagtcttgatggctttgaaggaatgattccacacaaagactctggacctccctgaaaccaggcactgcaaacggtaagccagcggcagccacagctgtggccgctgtccttaaaccttgtaattgtttctgcttgattgagtcttaagtcattgctttaggaggagaaagagacatttgtgtcttttgagtaccattgtctgggtcactcgcatttaactttccttgaaaaacttataagagaaaaacgttgcctgttaaccattaactacagggctcgtgatactttgagaaaatcttagaaaaaaatgtatacagttgtctggaattatttcaatgaagtgtattagttggggtactggcgctgtctctacttcagttatacatgtggttttgaattttgaatctattttgtctcttcttaagcaccaagtatagatacagtggatacactcactggtttttaacggtggttttaatctagaaggaatttaaactggaggctaatttagaatcagtaaggagggacccaggctaagaaggcaatcctaggattctgaaagaaaagatggttttagtttttatagaaaacactactaccattcttgatctacaactcaagacggtctaatgaattttgaagttactggtaaatatacttcctggttgttaaggaatgattatcaaatggatcagtgcttggatctgaggtcagtgtgagaggacagggcctgggctgtggatatacagaaggaaggccacagctggatagaattgaaaaagaatggagacctgctgctgaggcaagcagatcagccggactctttccagccatagcaaagaaccagattaataaagagaaggccagattaataaagcttgctgagcaaaatttagtgaacaaggttgacagcctggctaggaagctaggctctagttaagcacagttggactgagatgtgtaggcttccctgagcccttcaaaaatgtgctaagctgagatgattactctgaggtagccaaagctggacttgagcaggaacgaggtagactgcaatgagctgaattgagctaggccggctaagctaaactaggctgacttaaccaagatagccaaattggaatgaattgtcttgatctgggctgattggagctaaactctactggactgctctgaactgagctgtgttgggctgtgttgtgctggggtgagctgagctagcatgagctactctgtggtagctggggtgagctgggatgagctgagctgggtgagctgagctgggtgagctgagctgggttagctgagctggggtgagctggggtaagctggggtgagctgagctgggtgagctgagctgggtgagctgagctgagctgggtgagctggggtaagctggggtgagctgggctgacctgaggtggttgagctgagctgggtgagcagagctgaggtgagctgagctgagctgggtgagcagagctggggtgagctgagctgagctgggctggggtgagctgagctgagctgggtgagctgagctgggtgagttgagctgagctgggtaagctgagctgagctgggtgagcagagctgggggtgagctgagctggatgagctgggctgaactggggtgagctggggtggggtgagctgggtgagctgagctgggctgagctgggctgagctggggtgagctgagctgggatgagctgggctgagctgggctgagctgagctgggctgggctgagctgagctgggctgagctgggctgggctgggctgggctgggctgggctgagctgggctgagctgggctgaactggggtgagctggggtggggtgagctgggtgagctgagctgggctgagctgggctgagctggggtgagctgggtgagctgagctgggctgagctgggctgagctgggctgagctgagctgggctgggctaagctgagctggactgagctgggctgagctgggctgagctgagctgggctgggctgggctgggctgagctgggctgagctgggctgagctgagctgggatgggctgggatgagctgaactgggtgagctgagctggggtgagatgagctgaacagggctgaactggggtgagctgagctgggatgagctggggtgagctgagctgggtgagatgagctgggtgagctgagctgagctgggctgagctgggtgagctgagctgggtgagatgagctggggtgagctgagctggggtgagctgagctgggtgagctgggctgagctgggctgggtgagctgagctgggttgagctgagctgggctgagctgggctgagctgggctgagctgggctgagctgggctgagctgagctgagctgggatgagcagggctgggatgagctgggctgagctgagctgggatgagctgggtgagctgagctggggtgagatgagctggggtgagctgagctggggtgagctgagctgggatgagctaggtgagctgagttggggtgagctgagctggggtgagctgggctgggtgaactaaactagggtgagctgggctgagctgatctggttgagctgggctgggtgagctgagctgggtgaactgagctggggtgagctgaactgagctgggtgagctggggtgagctgagctgagctgggtgaactgagctgagttgagttgggtgagctgagctgggtgagctgaactgagctggactgagctggggtgagctggggtgagctgggctggatgagctgagctgggtgagatgagctgaacagggctgaactggggtgagctgagctgggatgagctggggtgagctgagctgggtgagatgagttggggtgagctgaactgagctggactgagctggggtgagttgggctaggtgagctgaactggggtgagctgagctggggtgagatgagctgaacaggtctgaactgggatgagctgggatgagctggggtgagctggggtgagctgagttgggtgagctgagctgggtgagctgagctggggtgagctgagctgggattagctggctgagctgggatgagctgggtgagctgagttggggtgagctgagctggggtgagctgggctgggtgaactaaactagggtgagctgggctgagctgatctggttgagctgagctggggtgagctgggctgagctgggctgggtgagctgagctgggtgaactgagctggggtgagctgaactgagctgggtgagctggggtgagctggggtgagctgagctgagctgggtgaactgagctgagttgagttgggtgagctgagctgggtgagctgaactgagctggactgagctggggtgagctggggtgagctgggctgggtgagctgagctgggtgagctgagctgggctgagctggggtgagctgagctgagctgggctgggtgagctgagctgggtgagctgagctggggtgagctgagctgagctgggtgagctgggctgagctgagctgagctggggtgagctggggtgagctgggctgggtgagatgagctgtgctgggctgggtgagctgagctgggtgaactgagctgagctgagttgggtgagctgagctgggtgagctgagctgggctgagctggggtgagctgagctgagctggggtgagctggggtgagctgggctgggtgagctgagctgggtgagatgagctgtgctgggctgggtgagctgagctgggtgaactgagctgagctgagttgggtgagctgagttgagtgagctgagttgggtgagctgagctggggtgagctgaactgagctggactgagctggggtgagctgagctggctgagctgagctgggtgagctgagctgagctgagctgagctgagctgagctgggctgagctgggctgggtgagctgggctgagctgggctgggtgagctgggctgagctgggctgggtgagctaagctgggtgagctgggatgggtgagctggcctgagctgggtgagctgagctgaaaggatctgggttggagtcagctttgcttgggtgagctgagcagggtttagctgagctaggatgagttgagttggctgggctgagctgggatgaagtaggctaaataagctagcttgagctaaatagagctggggtgagctgtacttaaatgagctgtgattgaagtgggctgggatgagctcagctgaactgggctagctgatgtggatgatggtgaggctgagttaggatgagcatgactgagctggtttggacatgaatgagctggacccggctgacttgggctggttgagctttgcaagatgatgtggactaaactgggctagctggcaggatgagagaggttgaactaggctcagatgagctaggctgagcagggcttaggtgaggtggtttgggatgagctgggataagttgggctcagatgagctaccatgaactgggctgaggtggcctgggagaacatgaatcgagttgcactgagtacagccaggatgaactgggataaactgggctaaactgggttgggctaagaatggactgcctgagttatgctaagctgagctgggatgaattggggattgtcaagacttaaatgagccagactgaactggttggacttgggtgagctgaggggacctgctgcagggccggcatagctgagttgaatttagatgaggaagggtgagctagactgagcaaggctagactgcttatgctgagctacactaacctggcctgagttgggccaggctttgttggccatgtctaaactgagttaagatcaacagggagtctagaggggtaggggatgaactaagatgaattacactagctgagctgaattgagataaggtatggtaacctgagctgaactggaaagagatgtactggataaccttaactgggctgagatgagctaggtctacccaggcctggatcagcttaattagggtaggctagaccaaactgtagcagtatgtattagcctgtgccaagctgggctacattaaactaaactggacttagctaggctcagattagtttcgctactctagatggggtaagttgggccaaactgggatgaactaatttaactagcctgagatgggcagatctgaagtgtagcaaacacagccagggtgaactgaatgagtttgaccaggcctggaccagttaggctaaggaccttgtcctgggcagaccgtgtgctatggtggagtttcatgatgatgccataagagttcccccaccataacccacgtttctcctaccccatatacctgtctggtgtgtaaacctaatctttgtgtgctgatacagaagcctgagcccatcccccttccaccaccacctacctattgctttggaatgagcaaggttatctcagcgaatgtctcaaagggaagccgggacctaggcctgtccctgagagcagatgttcatgcccctggagtggctgccggtggctgaagggccagaaccacctactctagaggcatctctcgctgtctgtgaagtcttccaaagacattcctgtggttagaaggcagccctgctgtggctctgtcccatagaccaaacttacctactatctagtcctgccaaccttaagagcagcaacatggagacagcagagtgtagagagatctcctgactggcaggaggcaagaagatggattcttactcgtccatttctcttttatccctctctggtcctcagagagtcagtcctccccaactgtcttccccctcgtctcctgcgagagccccctgtctgatgagaatttggtggccatgggctgcctggcccgggacttcctgcccagctccatttccttctcctggaactaccagaacaacactgaagtcatgcagggtgtcagaaccttcccaacactgaggacaggggacaaatacacagctacctcgcaggtgttactgtccgccaaaaatgtccttgaaggttcagatgaatacttggtatgcaaaatccaccatggcaacaaaaacaaagatctgcatgtgccgattccaggtaagaaccaacccttcccgaggggatggggagagggggcaggcccaggcatggcccagagggagcagtggagtgggtcttaagccagcctgagctcacacctcaacctttcattccagctgtcgttgagatgaaccccaatgtgagtgtgttcattccaccacgtgatgccttctctggccctgcaccccgcaagtccagactcatctgcgaggccaccaacttcagtcccaaacagatcacagtatcctggctacaggatgggaagcctgtgaaatctggcttcaccacagagccagtgactgtcgaggccaaaggatccagaccccaaacctacaaggtcataagcacactgaccatcactgaaagcgactggctgaacctgaatgtgttcacctgccgcgtggatcacaggggtctcaccttctggaagaacgtgtcctccacatgcgctgccagtgagtagcctgtgctaagcccaatgcctagccctcccacattagagcagtcctcctacggttgtggccaatgccacccagacatggtcatttgcttcttgagccttggcttccaacagtggccaaggccaaggatgagcagtaggcagcagggggatgagagtcagatggagggaatcagcatcttcccttaagcagatttggaagatggagactgagcttttatccaacttcacaactagacacatcacaacctaacacagtgttctcttgactgcaggtccatctacagacatcctagccttccccatccccccctcctttgctgacatcttcctcaccaagtctgctaagctgtcctgtctggtcacaaacctggcaacctatgacaccctgaatatctcctggtcttccaaaagtggtgaaccactggagaccaacactaaaatcatggaaagtcaccccaatggcaccttcagtgctgtgggtgtggctagtgtttgtatggaagactgggataacaggaaggaatttgtatgcactgtgactcacagggacctgccttcaccacagaaaaaattcatctcaaaacccaatggtaggtatccccctttccttcccctccaattccagagcataccctgtacctcacagggagggcaggtccccttctaccctatcctcactattatctttgcttacagaggtggccaaacatccacctgctgtgtacctgctgccgccagcccgtgaacaactgatcctgagggagtcggccacagtcacctgcctggtgaagggtttctctcctgcagacatctttgtacagtggcttcagagagggcaacccttgtcctcagacaagtatgtgaccagtgccccaatgccagagcctggggctccaggcctgtacttcacccacagcatcctgactgtgacagaggaggaatggaactccggagagacctacacctgtgttgtaggccacgaggccctgccacacatggtgaccgagaggaccgtggacaagtccactggtaaacccacactgtacaatgtatcgctgatcatgtctgacacaggtggcacctgctattgaccatgctagcgctcaaccaggcaggccctgggggtcgagttgctctgtgtatgcaaactaaccatgtcagagtgagatgttgcattttataaaaattagaaataaaaaaaaatccattcaaatgtcactggttttgattgtccgatgctcatgcctgctggggcaactgttgtgttatgcttgtcctgcacacaccctgtatacttgcctccaccttggcccttcctctaccttgccagttacatccttgtgtgtgaactcagaaaggcttacaacagagtgtgagcatgccattcctccagctacttctagatatggctgaaagcttgcctaccttggtgcaggcagcattcaggcacatccacagacacacagagacagacatgcatttatacatagatctagagatggacatgtatagatacatgcacgaatatgtattcatagacacacagatagaggttccgcatgcgtgcatggacaaatacaaacaccttcagagacaaatatgcacagacacacaaccacacatggaaacaggcacaaacacacatgatcatgtgtgcaccaaaacagaatataggcaaatatagacaagtgaactacatagacatgaagacatgcatacacagacatgtaaagaaacatcttgaaatgtgtacactaacatgtggacagacatggcacacagttacacctggtctctgaccaggaccataatctccagggttcagggctcagagagtccatactaggctgggtggcactgatactcctcagggtcccactctatgattaggggaaatagcccgaggagcaaaatgtgcatttttggctcaacaccatggggcagaagataccccactaaccacccatgacagaaaattagccttggttgtgtctccattaatagaatacctcaggagatcaatgagagagcgcttgacccactcacttcccagtccagatgcagaagacacaatgcaattgtccaaaagaattgtacacacacacacacacacacacacacacacacacacacaccaacaaaggaacctctataaggagtcaccacccaataacattgcctctttggattcacatcctggacattcttcatattcatatccatttgggacctgggctttagaaatccccaagggctcatctttacagaggtcagagatcccaataaatgccctggtcccacagcctctctatctcttggtaccaagactcaacactgctggcaggggtagaacaatcaacacacaggaactctgatcaaagagaggcatgagatgcctgggtccttcaggaagtaaggagggataacctctgatatgcctactcttattcccaaagcccaggagaagggaaacctgctctgaattctcagtctaacagccccgatggtgccacctgctcagagaaagtccaaagaacacaaaaatcattatgccacatttcctgagtctgcctttacccatgtccgtatgttgcatctgccttgcttgctctgctgccccagagttcctgggacaaggccccaagttagtgcctcctccagtttgacctgtgctttgtctctgtctagcttgagctattaggggggccagtcaattctccagaaccagcagaacacccccaaccctgaggcaaatgttcaatcaccccaaggcttggcttgaccctccctctgtgtgtcccttcacagagggggaggtgaatgctgaggaggaaggctttgagaacctatggaccaccgcctctaccttcatcgtcctcttcctcttgagcctcttctacagcaccactgtcaccctgttcaaggtagtgtgtgtggtggggctgaggacacagggcagagacagggagtcaccactcctcactgcccctacctctactctgtaaaagggaacagcaattcacactgtctctgtcacctgcaggtgaaatgactctcagcatggaaggacatcagagagcaagagaccctcccacagggacactacctctgggcctggggttcctgcctgtatgactagtaaacttattcccacatctttcctgtgttgccctccagctttgatctctgagacgggcttctttctagactggccaaagactttgtccacttgtgcaacctggaacaatgtctggaaccacagacagctgtgctgtatacaaatgtcactttgaaataaatacttcaccttgcgaacccactctattgtgaaggaatttgttcttgttttcaaacttttcctgtggtgttgacatcccaaagactctctaaatagagcctgggaacttgaagtgaacagtctgatggggcttaagagtgaaagagggaaaggaggtgtggaagaagagagagagagagagagagagagagagagagagagagagagagagagagaaaccaccctgacagcaaagtatagcacaggcagccaatgggtagcagtctggtttatccaccctgatagaagaaagtagggcagagaaaactccaggcctgatctcacaaaagcaaccgaatctgaaaagtagcctctagcctggggtgtctgctccatccctcagcccaccctcttgggctggcgttgcttccagctagtgcaatactttggtgttagccaaacctttgtggtatgtggggtgtgccttgggagagttggctgagatctctaggatgtttgtatcccttctgcaacatgacaagccctaggggttagcccataacttgaggactcaaaccctctgtctataacaactgctgtggtcactggagaaggacagctaaaggcctgctcacacagcaggaaaggaaagggaggtaggtcatgtacttcagctcagaggaggaagcacagcagatacaaggtgagggcagtgctaggggttctgctgttcaccgtgtggatggctggaggaacctcacagaggtgggactagctggttacattgagagcaggacctgggagcagggcataagaaagaatatcagacagtgggagggaactgtgtagatgccagggtcctaaagagagtctttaaataagcatgtatggtagcaccttggtgatggcccctttctgagttgggtttctagtgggtagctgcaggagagcaacaagcatctattgagaaaacactgtaaagacgatagggcccaccaccaaattccagatatattttaggcattcacctcaataccctactttccataccagcatctgttttagtttccctgggctgcgggtgcaaagtgccacatgtggcagtttgagcaacagaactctgttctttcccagttctaaaggccaggattctgggcttcagcaggctggttcctctgtgcggcagggagaatgtgtcacagacttccagctctgaagccatagcatttgactaatacttgtctcctggcaccaacaccccagttactgtttcaaatgcatagcccatccccatgtgtgtttcctttgtacttactgccacgtttcacgaacccagttctgctgggtttgatgcccaccctcattcagcacaagttcatctcaggcagattccacccactacgacctcagagctagaagtctatgacacgttctccctgctgcacagaggacactagcctgctgtagcccagactcctggcctctagaactgtgaaagaacagagttctgttactcaaactgccacgtgttgcactttgccccagcagcccaagagagctacatagatgttagtatatgacgtaaggtgcagaggtgactttggaattgggcgatgaacctccaggcagtaaacagcctgctgacctttgcattagctgtgtgactgagatcacatcagttcccgacccccaagccccttcagacgtcacatcaatagagtcaaccgttagagtccatcgctataggaatgatgtcgcttgcactttagaaaggttttataaccaggactgtagttgtaccttaagctttgtgatatgtaaagaagtgagctaattatcaaaaggaaacattctgccaagtgatgttgtacttgaatgtgcccaaaacaaacatcccagcatcaaacgctagtatcttaaaccaacacaggtactgagtcatattaaactgaacgtacttcttgattcacacagacctacactgctgtctctgtttgcggagacccatgcagactaggtactggtgcacatagtcaacgagatgctgagggaggagagcacatactttaaggtagattaaaagggcactggacttggctattgacctccaggccacgctcaatgatgaggcaactaagagtctctgtacagccagaaatgtccccatatgctggccaggtataagatagatggtactagacacttggtgcaagagaaagagagtgtatatgacagacataggcacttgtagacttagtacacagcccactcagggccctaactgtctaaaaatgtgaaggagaatccataactcagtccatgagcattacatacacacctgtagctccacccacctcatcttcacaccttttaacatacagatcatcaggttatatcaggcctgtggcactctgaacccatctccatggctagtctatatccagaatgctgatggaccagcggtcaaggaagcctctctacctaccactctgatgccttttcctcctgagcttcatggtcaaagagaggatccatgagagcatccagggaccaaccacagccctatcagcacatggttctccagccatgtcgtcaactctgtctacccttggttattgctctttaataggtaccttgtctcactgtggcttataggttccatacgtgactatgatatgatagttcttcatctcaggtcctctgagtatcaacattctcacagacctagagcctgcctttgctctgaaagctgtatcttctcaacttggcactgacacagacagcaccctccattcctgtgtattgacccacatcctacccggagatattcctcaagaagcctcctccttaacctatgttcttccccggccagcacaagctcctaaatctgtgtcctgggtctgagccttggacctcataacgtggatcttctgtttacagaggttcaccccagcatcctacactacaattacccagcatgggcacctctgaccagacataaccttcctgattaacaatctgcttcttgttctccacattgcagtctttctgatgaggcccacataacctacaggctcctcacctctttctctgacacttcacaacacattcttccttcccttccattacatactgtcagtgtctctaaacccagagaaacacctggcttttcctagcagtcccaatcattcaagttaaggaccctcactttagtgaggatggccagtcccatgacccttcagaatttgttcccatctacatagttctgaggccctgaaggtcaccctctcccaatatctgtacctaactcctcctgcaaagacctgcaatgagctcctctactctgggggatccactaacctgtgtatcatgtgccagagcaggtttgattacttcattccgtattctcatgagcccctgagaccagaactggaatccctgattccacaatctaaaccatcaggttcccatggcagtccattttagagaccttctggtccgtgcctcttcttaatttatccaaggcattctcctgagtctcagcaatgcttctgtctgaagacataatttcctctacttggacactcaggcagagactcgagcctcttctttaaccgattcagtttggatggcacaccaggcttatcagtgttttcttgagatagcactagctagagacagggacagagaggtttagccaccaaagctggacttagatcacacatgaacaagaggcccagaggctatgaaccctctccaatgagctggtcaggaaagagtgggcataatcactcagcctcagccagctcagggacccagaaggcccaggtgcacagagtaggagcacatccaggcttcctaccttgtcccctgagtctcaagagtaccacatcaactactcccacacatccacatgaactaatctcagtcagctttggactccccctcatgtccagatacagaaacctccccagaataaaggggaacctcaggaaataccttatgccacccactgtcaatcatgttcttactcaatcatagggtggaaatagggtggcattcgcatctctggaacaaaggctgtgactctgggaaagacaagagaaagccaggaacaaatacatctgctttcacagcttccacatgtcaaaggggtcagcactaaatgaagctgcagaagaagaagacctcacagacagccagcatctgtagcccttccagatctttgagtcatcctatcacaggagattgagaaggagttgacggaccagcccaagcagaggaagcctgtgtgttcaacagtaaatgtgtttgccagcagcctgatgtcaactgagaagactgtggcgagtgcttgggagacaatcacgggcagctagagctgcacaaccccatagacaacaagcctgaaacacaaggagatgatgaaatatatccagaagactgcggaatcagtttggcctggaccacaggttgatagaaccaaggcagctgagccctgtggtaagtgaccaggagggcagagggagggagcttccaggagcatgcctgggaatgccttcaggccttctgagaagcagaaagtaggcaccctggggttccaggaaccatcccagcactcaagagttactaagggaatagaagcaaacctgagctgaaggagagaaagaaaagtggagggaagcccaagccactcaaagtaacaggcaggacaacttccagtgagctgagagaacaggagtgctggagaaggcagagcaagcccagcagatcaggagaacctgcataggagtctggatgactagagaaacccagaaggtgagagaacaggcttaacagctgtcatggacttagggatatgcaagcctggggcaccaagctgatctgcatagagggcaagggtaagtgggaatccaagagatctaagaatgaccagcgctgggcagagaggtggcctgggagaagatggctggtcttccccatgagtccaatagcaagattgtcggaataggttatcctatgacagatggcagtatcagtgaccaaatgaagacgctatggaagaattggaccatgtgggagttaagagttgaggacacaaggctgacctgcccatgggaactacagctgataaaagtgctgtgattcagggcatttctggaagctctgtgatccaggttgcagtacacaagtaaactgggacagacgggagttctgggggttcagttcagatactaggaacttaggaaactgggaaaagggaagttggggctgatggcagaactatgagaaggcactggaattctgaagaccagaccttctaatcaactatagaggaaatggagtgggtaggagtggtggatacagctgagcatcacaggggacctggggattggggacagctatactggggctagcagtgcaaacacagaaattgggggaccaaagggggaattgaggatgaccttgggtagatagaaatgctggatgcctaaggtacctccaggagcttagggaacctcgcagagcagctacaaagctggtggtgttagtgacactttcagaaccagatcgggcaggttggcatgtagaaatggggttaatggagacccaggacagtggcagattcagaataaaatacaaacaaccgaaagagttatgtgccctgtaagaagttgatctgacacccacagcagagacatctaaggtctcacagcccacatcaaacaggcttctgatctaaggacagcacaaaaggaaggaggcatcaaaccatcctggggaagacagtgcagtagtagccagaagtgtaagcccaacagcagtgggactggtgtagcagccagggacagggtccctgccaagatgagcctcaggggagctgagcagctgagaaactcaccagctgagaagctcaggggaatcagggtaagtggaggttccagagaatcaggggaagtcaagagctcagaacccaagaaggggcacctgcaaaagagctaaggcctatgagagtgtggggaacactttaagcagctttaggggagccaagacaggtagaagtgtggggacccaaacagggaagctccaggggagctaggaaaggtggaactgtgggaatccaggcagagcagcacctggggagcaaggaaagaagtgtggggatccaggcagagcaggtccaggggagccaaaaagtggaggtgtggagacacaagcagggcagcatctggggaaccaggacaggtggaagggtagggacccaggcagagcagcaccaggggagccaggacaggtggaactgtggggatccaggcagagtagcaccaggggaccaaggaaagaataagtgtggggatctaggcagaacaggtccagaggagtcaaaaagtagaagtgtggagagccaagcagggcagcatctggggagccaggacaggtggaagtgtggggatccaaccagagcagcaccaggggagccaggaaaggtggtagtgtagggtcacaggcagagtcgaaccagggaaccaaagaaagaagaagtggggggaccaggggagccaggacaggtagaagggtggggacccagacagagcagctccaggggagccaggacaggtggaagggtagggatccaggcagagcagcaccagggaagccaggacaggtggaagggtagggacccagacagagcagctccaggggagccaggacaggtggaagggtaggggcccaggcagagcagcaccagggaacgcgggacaggtagaagggtggaaacccaaacagggcagcaccaggggagcaaggaaaggttgtactgtggagatctaggcagagtaataccagggaagccaagacaggtagaagtgtggggacccagacagagcagctccaggggagccaggacaggtggaagtgtggggacaaaaatggggcggcttcagtgtgtctggggagcaaggaaaggtagaagtggagagacccaggcagagcaataccaggggctaacaaggtagaagtgtggggaccagaacagagcagcaccaggggagccaggacaggtggggatgtggggacccaggcagggcagctccaggggagccaggacaggtggaagggtagggagccagacagagcagctccaggggagccaggacaggtggaagggtggggaccaaggcagagcagctccaggggagccaggacaggtggaagtgtagggacccaggcagagcagcaccaggaaagccaggacaggtggaagggtagggatccaggcagagcagcaccaggggagccaggacaggtggaagggtagggacccagacagagcagctccaggggagccaggacaggtggaagggtaggggcccaggcagagcagcaccagggaacgcgggacaggtagaagggtggaaacccaaacagggcagcaccaggggagcaaggaaaggttgtactgtggagatctaggcagagtaatgccagggaagccaagacaggtagaagtgtggggacccagacagagcagctccaggggagctaggacaggtggaagtgtggggacaaaaatggggcggcttcagtgtgtctggggagcaaggaaaggtagaagtggagagacccaggcagagcaataccaggggctaacaaggtagaagtgtggggaccagaacagagcagcaccaggggagccaggacaggtggggatgtggggacccaggcagggcagctccaggggagccaggacaggtggaagggtagggagccagacagagcagctccaggggagccaggacaggtggaggtgtggggacccaggcagggcaccaccaatggccaacaaggtagaagtgtggggacccaggcagagcagctccatgggagccaggacaggtggaggtgtggggaccaaggcagagcagctccaggggaggcaggacaggtggaagggtggggacccaggcagagcagctccaggggagccaggacaggtggaagtgtggggacccaggcagagcagctccaggggagccaggacaggtggaagggtggggacccagacagagcagcaccaggagtgtcaggagaggtggaagttaagtagttataggggaacaggggcagaatagaatgagggatgcaggctgagaggatacaggggaaatgtggcaagtggaagggcaggaagagaggcagagtggctacagggaagttgaggcaggtaagactgtctgttccaggtcaaaaaacactgaagaccagtagaaaggaaactggtgcatgtggtagtgggggattcttagcttagcagtcacagggaaagtgagccaagtaggaatgcaggcatggggggcaggcacagctgagcaaacactaaagagctgtagctgaagggttataaggtaccaagctgagaagctgctgggaatctggagctaatggggtgtgggggagcaggctgagcaactacacaggatcagggataggtaactgtgtaaggaggcaggctgagcatctccatgacagctggagctactatgaatgttaagctccagactgagcatctgcagggaaacagaggcaagagggagtgtggggatccaggctgagtaggtccagggaagctgtagtaggtggaggtggaggcccaggctgaggagctacaggagagatgggacactagggagggcagggatcatggccaagcagatactcagtagctgagatagatgtggggaatcagcttaagcagcagacacaggggagcaggatctagtcagcttctagggatccaggctgtgtagacatggagggactgggggagctataagtaaatacactaggcataaaattacagggaaacggaggccagtgggaacgtgggcctcctactgaacaagtaacagagagccagaactgacgggttgaagaggaaccaggctgatgagctccaggaaatctgtggggactcggtcaatgggagaacagggtgagcagctatagaggatcagggataggcaaaaacgtatggagtcaggctgagcagttacatgagagctggagccctagttatgtggaggtccaggcagaggggctggagggtagctgagggaaatggtgctagagaatcaggctaggcagacacaggggagcaggttctagtctacatatgagtggggatccaggatgtgtagagaaaggatagcaaaggtcatggaggattccaggcttaggggtcactgggaaactaagactggtggaagtgggattgtcctaagtgaacaaattccatgaagctagagccagtgggtgtaaaggtagcagactgaaggactatagagtatctgggggtggatgggaatgtggggaatcgtgctgagccactacaaggacagtgtggctagcaggctgtaggagaccaagctgagtatctgaagggaaaccaagggaagtggaagtgtaggattccagaaatgagcaaatgcagggcacttgaggcaggtatcagtgtagggaacgagactgagcagttcacaggtcacccagggtaggtaagagttctggatcatcagagaagcctctggaagccctaagcacctacagtagacctaaggcaggtggggtgcagggaataagttgtgcagctcctgaggaggaggacaggttggagtagaggaggttctgactaaagagttgaatgggagcagggcaggtgggaatgtagaggaactagctagacagaagtccagatgagattgagggccacatgatgccctgagccgatgagctggccttagaaatcactctgctgggaccagggccaggggtttgaggaacaaggctgaggtgaaatggtagcatgacagggaggcaatggcagagaggaaggagaaggcatgcttaattcatggtggagtgcagggagggaaagagccaggaggtctaggctggagctgatccagctttctgcactgatgagaggggcgggactgagttcttttggctccaggagccagggcaacaagacaaaggcgcctagcatagcaaggacacatctggatctaagaccaggagaagagggcaagaccgaaagttcaggaggtcatgggagggagtgggaaatctacaagggactgtctttagaaaagagtaagtgcccagtggagggagtgcccaagcaacaagtccagtgttgggagagatcggggtgggcaaaggctgtatgtgcagtaggcaggcccaagtccccaggaaggaaagaagaagtgcataggaaaacgggtcaggtctagcaggagccaaccgaggtgctcaggactgagaggcagagcccaagacacaggaatcgctgagctcatgcaggtaccaagaataactgagagctaagagaaaaattatctagggaatagggggacatgaggaaggactgttggctgagaagggaaagggacagggagaatcctaagggttggcatagacaaaggaaacacacaggctttgggttgttagtccggggctctgcatatgatccaccgagattgtggaaacagaagagcaggaagatcaaatctgtcccaactatacagggacacacggtcaacctacaaaaggaaggagatgtgaggatcaggggctgagcagtgaggaggtgtgtggaggtgttagagctcaggtgcagcagagactagcatggccctggggatagagggaaggacccaagggacagtagggacaggagggcgaggtgaggtgatgaccagcattatacaaatggtggcgctgtccaacttctagggccctgtgctactgagaaaggaaagggacttccgaggtttggcaatacaagccccgtgcaaaggcagaacccagggcactgtgaagacaacactgcaagacaggagaagccaaggctgagttcaccgaggtcacattagtgagaatacactgcgaggagaggggaggcgctgagcacccagccacaccagacaggcccatgctgagtccctggacagtgggggaggggagcacctggtgacctgtaagaactgtgagactggaggagaaccaaggtaaaaggtgtgtcaaaggacacatgtttagcaggctgggccgacttaatgcaggacacacgtggtggcaaagccaagagggctgcgtatgagccacaagtgaatcctgacccaagaatagagagtgctaaacctacttacatcaaagccaactgaaaggacaaggccagcaaaacgaagctaaggccagagatcttggactatgaagagttcagagaacctaggatcaggaaccattagtgaacagacaaaggcaggtaaagcagcctaggagtggacaaagacaggagaatacagaagacggcagggatgacccgacttcagtttgggcttcactgttgtccaaactgtgtgcagattatggcccatgggtaagaggtttagcattagaacacagatacccacattggacaatggtgggggaacacagatacccatactgcaaggctcttcgggccctttcctaaaagtgtactaggagtgggactgggctcaaagggattaggtgtgatctggcctggtgaggctgacactgacaagcccaatggttgggtgttgcatcctccatttatacagccagggacttggggagggtacaaaatggaggacttgtaggagcttgggtccagacctgtcagacaaaatgatcacgcatactttttcttgtagctgaaacaacagccccatctgtctatccactggctcctggaactgctctcaaaagtaactccatggtgaccctgggatgcctggtcaagggctatttccctgagccagtcaccgtgacctggaactctggagccctgtccagcggtgtgcacaccttcccagctgtcctgcagtctgggctctacactctcaccagctcagtgactgtaccctccagcacctggcccagccagaccgtcacctgcaacgtagcccacccggccagcagcaccaaggtggacaagaaaattggtgagagaacaaccaggggacgaggggctcactagaggtgaggataaggcattagactgcctacaccaaccagggtgggcagacatcaccagggagggggcctcagcccgggagaccaaacattctcctttgtctcccttctggagatttctatgtcctttacacccatttattaatattctgggtaagatgcccttgcatcatgacatacagaggcagactagagtatcaacctgcaaaaggtcatacccaggaacaacctgccatgatcccacaccagaaccaacctggtgccttctaacctatagacaccaataacacacagccttctctctgcagtgcccagaaactgtggaggtgattgcaagccttgtatatgtacaggtaagttactaggccttaaattccagccccaggtccaacaaatgtcctctgaggcccatgttggaggatattggcatatttccacctttcttcttcatctacaggctcagaagtatcatctgtcttcatcttccccccaaagcccaaagatgtgctcaccatcactctgactcctaaggtcacgtgtgttgtggtagacattagccaggacgatcccgaggtccatttcagctggtttgtagatgacgtggaagtccacacagctcagactcgaccaccagaggagcagttcaacagcactttccgctcagtcagtgaactccccatcctgcaccaggactggctcaatggcaggacgttcagatgcaaggtcaccagtgcagctttcccatcccccatcgagaaaaccatctccaaacccgaaggtgggagctgcagggtgtgtggtgtagaagctgcagtaggccatagacagagcttgacttaactagacttctgccctcttactgacctccatgctgaccactctctgtatccacaggcagaacacaagttccgcatgtatacaccatgtcacctaccaaggaagagatgacccagaatgaagtcagtatcacctgcatggtaaaaggcttctatcccccagacatttatgtggagtggcagatgaacgggcagccacaggaaaactacaagaacactccacctacgatggacacagatgggagttacttcctctacagcaagctcaatgtgaagaaggaaaaatggcagcagggaaacacgttcacgtgttctgtgctgcatgaaggcctgcacaaccaccatactgagaagagtctctcccactctccgggtaaatgaccccagagtcagtggcccctcttggcctaaaggatgccaaaacctacctctaccacctttctctgtgtaaataaagcacccagctctgccttgggaccctgcaaaaatgtcctggttctttctgagatacagagtccagcgaggtcatgggctgaggggcgtccagggtttgaggcctgaggtttgactaaggaaaaagggtgatctacactgccagacacagcacttttgatttgctggcatgaacagaatttacctctcactgaaaagtggaggctttatcccgaggcaatccctcttgctttctcttcctctacctaatacatctatagtgggcacagaatatatcatgaaagtaaggacgacccaaactccacctccctagtccacctttacccctcttcctagccaaggatcccactgaaggcactcaatggacacatatggtcacagacagacccttgctattccaccactcaatgcaagaagcgttccagagactaagtctaatgtaacgatgcacatagctgtcactgctctctcactgcccatgagaatcaacatggacccattagacacaacctgatgagcaacactgagggcaaaaggcccatatgtatgcatgcacacacatcttcaaatgcacagcacagtgacacacacacacacacacacacacacacacacacacacacacactggaacctcacatgggcatcctgtgcagtactcccagatgaaaagaaaccaggtctacacacaggatcatcccaacattcacaagtgggccagctgagacagatacaacttttctctgccttggatgcccacagacatcttcatgcacacatgagtttcctggggtcaatctgtccctgaccctgggatggtgccccaacctcacacagttggcacccatccgaaactgtataacttactcacttcccactgtggatcttaactgcagtcctagcatcatggggaatcagctctgcaatccctctggccctcagttctcggtcatcagcagatacaggatcaggcagaccacacagacactacccatgagaggcacaggccctgactcagcctagccaggttcagaactcaaggctggagcacacacagaatgacctagtgtataggccaggccaccatcaggtccagggtgtctggtgagctcagggacaaaactacagcactttggggaactgaagtttctggtccagagagagatcagaaaggagagatggcctcagggagggtctgctggcccagtcaggctgtaactttctcctggaactccacacaacctcatctgacacagggaatggccctagtcacgccgtgttgggataaacaaacgctgacttccctctctgtccagggatggaagtggacgatgcctgtgctgaggcccaggacggggagctggacgggctctggacaaccatcaccatcttcatcagcctcttcctgctcagcgtgtgctacagtgcagctgtcacactcttcaaggtcagccacaccatctccacagtgtccacaccatcctcacactgttcctcatactgtctctgtgatcagctatgccccacactgtcccatgctattgacctgtcttacatgctgggcaatgccacctaaccttctctatgatacagtctcacagtgtcccatgcagtctccctaattccccaagatgtccgcactctattgctgtgttgcctcatgctgcccccacactgtccatccctccctggtatgctatcccaggctgttgtctctattttcatgctctcctcacactgtccctagtgtctcatactgccaatgttggctcccacattgtccccacactctgcacacaaccggacaataaaccctgctgtcccataatgttccctgtggtccccaactctatccctgcacatttgtctatgttccctgaattctcatgttgtttgcacactgttagtgtctaacgaactctctcccaggtgtaccttcttccatgctgtctcacctcatctcccattctgtccttgtactaaccccactctatcacgacactgtccctattcactgtccctatgaagtgcccatgctgtctgcattctgtcccatgttgtatcctcatcccggtctcatgcagttcagatctatctgacactattcccactctatgcacacatttccccctataccatccctgtctgatcaacatgcaatcctctagacacccatgtagcaggttagagactctagggatgggtacctgcctgactgagctacctctcttggtgggagaggaaacacaggtgagagtgcagtcctgatcttatcttattcaccctgtcccacaggtaaagtggatcttctcctcagtggtagggttgaagcagacgctggttcctgaatacaagaacatgattggacaagggccctaagccacctcctataatggcaaaggattccccacgccctagaggaccctgtccaatgtgccaagcagtctgactcagatcacactgtctgctcacttcactatcttctgtctatgagacccaacctccctcaattcttctctctctggaggactatgtggacattagatttccacaagccacagcctccaggacctaaaataccatcacagcagcagccaggacactagatagggtcagaaggaccatagtttcctgactagtttatccaatctgttgggacagaagaatcactgaaaaagtgacaagtgcccaagttgcctgtgttcagcttggaagggaccaaccttggaaccagtcctgtcagcatcatcttctaaaacacaagaattgagtatgtaaatggcagattttggatccccagggtaagacagacttcaaccaggccacgacctgggcaatcatggcccagctgaagttgactgaattattccagtggccttcacatcgtcttgccaggttccttcttaccacttccatgaaccctgggatacagaaaagaactgtgcttctcgggatcttgggacagaactgtctaattggtgggatccttaggtagatctttcttccagtcacgggtataatacaatacactagattctcacataaaggaaaaaattcacacacaactccggccagtcctgaggcctagacaccaccacctctctggaattctgagctctatgctggaggcacaagagaggaaggcctggacttcatggcctctgtgtagccctagtaggtgcagaggcccctaagccggggttgggtgaccagcaaggacctcctggagagggatctgatgagtagattccacctgggacagaaggaaaaagatgaaaagcaacagaggtggaagggcactggagagagccatggtatagcaggtttatcttgcagacctgacatctgtccatgactctgagacttagctaatgacagctggggcagcagtccaaggaattaccatgccccctaacaccaggctcctggagtgtggagtgggtctactccagagctccaatacctgtttctccatcacttctcagccaatgagaaatcggtttccagacaggaagaaaaatgaaggcaggaaggaaaagtgggcacctgttcttctgtgagtggcaggaagttctcaaaagactcaggactttggcttctaacttcctgtggatcattgatgtctctaaggtctctgtctgctttgttggttttgtttgtttttggtttggtttttttttttttttttttggtcaataaaacgttttttcaaacattccacaatctctgtgttcttcctatgtgaaccagccctggtacttagaaacagcactgttaagtagaccagtgagtcatgaagaacatactacctctcctggtcctgtgtcctaccagttctcctctaagggtcccttcacagctgtgtgccagctctgctatcctataccagataggtcctccgtctttcttccctatgggcagtttcttcccagccagaagctgcctttgtcctgtaggttgcccactcatggcctcccacaccagccacacaaactaagaagcaggtgtctcagtgacctcaggctcagtgataacatttctatggaaaagtgaaggaataagaaagagaagaaatactccagagtcagggaagagaaagattataagggatgtttgctttctcaagtatgtttggagaagttccagatcaggcgttgacaaggtcgggttctcagcagggctcttcttgcctggtaggtgccttctcctccttgtgacctcacaggctttccctctgtgtgtgtctctgtcttgatctcttctcataagtacacagtcaggctagaagaggtacaccctagccctaattataacttatcagtttatgaccctgtctgcaaacataggtcatggtggcttaaatgtcatttgctgaatcttctggggacagaatttagtccacatcagctctccctatggaccccaaaagttcatatccttcccacatataatgtccctcaccccatacaaacaccccaaagtctcacccttccaccatcagctctgtctcaattctcctccaagactgctagttaggtaagtgtgagatgtgggtgtgactcattcaggatcaagttcaagccatgactgtcaggaaagaggtttaggccgtcagcgcagagcagattccaggaccatctgagcagttgctgaggttcaaaggcagattatagactgattccttgctatagagaagatagcccattgtgatcctctcatactagttcagtgataacaattctatggaaagtgaaataataagaaagagaagaaatactcgagtcagggaagaaaaagaacctgcaggggctgccaattgtctcttgttctgctgggcgtgtctgtgccctactagagttggattctgtcttcccatggagacaaggagacaccggctccatggcctgagatagcaccgtagaggggcccagaatttgcttctggaatgtaggagtgttagcaccaatggagagctaaggtacacaaaggcctcctaagcaaagacccaaaaacaggagctaggtgctaagtgtgcagttgagttctcagatggtgtttagatgtcctcaggtatatccttgactgttagagactgttcaagccattatgacctctagtgatggctatatgagggaaatcaactgggctggactggtcaagagaagatcctgtcaccacagctacagtggtgaggggctgggtggggggcagaatccaaactggccaatgccattacagtttctggtatagggaaagacatgcttttcctcggacagagaagcagcagatccctgtgagtggtattgctgctggggaagccatagggagatggacctcggagggatttgttgctcatgtgcagacagctgcaaggagcctgggctttggccaagcacactgggcagccgctacaatgctacacactttgggagttaggacagtggaacctagactacaaagaggacagctgcactaaccctgagaaaagttacttaattcttcacaaacctctgtttaatgtgtgaccaaacatccctccctgcaaagcgagggaagaagaacatagaatagtgaatttaaagaacatttaggcctgggacagtttccttgctcagataagaggaaatgtttgttttatctcatagttcaagtgtacagtctgtcacagcaagagtcttagtttcatttctgttgcaatgataaagtaccctgaaaatagcaactttattcagcctgctgtttaaggttacagtctatcaccgtgaaaagtgagagcaggaacttgaggcagccagtcattcacacaatcaggaacagagagaggggtgtgcacgtgcccactacccagtgacacgtgacgttagaaaggaaatttggtggggataaaagaggaaatggaggagagggagtagggacggattttatatattacatgtattatgaaattccctaacaataaagagagctacaaacggctcattaggagaaggtacaatgtgtgaagctcttcagtgggttatgaagtagggatggtgaagcccaggtgcactgaaaatgaatttaccccagaagccgcccttcatatgtgcaccatgacatgtgcacgcacacacatgtacacaattatacatagacacattcaacataaacacaacatacatgtacatacaccacaacaccacacacacacacacacacacacacacacgaaacacatacataaacacacacaatcattcatggacacactcaacataaatacaacacaccacatgccctcatacataccacacatacacacacacatgcacacacacacacacaaaacacatcaatacatgcaccaccacacacataccacacacacaccttcatatacaccactcagcacacacagagacacaaaaaaaatacatatttacacaccacacacacatacataaacacacacaatcatgcatggacacactcaacataaatacaacacaccacatacactcatacataccacacacacacacacacacatacaaaacacataaatacatgcaccaccacacacacataccccccaacacacacacacacacacacacacacacacacactagaacacactaatataataatgtttaaggactgcatcatttttctatctttctgcaggcacttgtctgaggtgctgaatgttttcatgctcccatccttgccaaacagcactttatgaggagttataaccatgccacagcctcagtgtggtgctgacttaaaagttcctccaccaaataaactattccattccttccgaaaatagccagatactttcccagaatgtaatacaggtcatcaggtcttgatgagatcttgtctccccaccctgaaacctcatgagctggatccttgctgtccttaccccctttttaatgttccctgcactgggctttctcgtcccacagcatccatgtaagttatcctgaaagatgccacatcctttcctctgctgacaaatctgtccaccttactgtttaagttcctagagtaggtatattctgagaaagtacttatttatatccagagaatatatacatttcacatagttccttttgttctggttattgatgtcattgggtcctgaagttgtgtttggaccttacaatgacaaaaacccatctttccctttcttttaccaccaattctatctcatctatctccctgtttctctctgtccatatctctgtctttttctctgtgtgtgtgtttctgtgtgtgtgtttgtgtttctctctctctctctctctctctctctctctctctctctctctctctctgtgtgtgtgtgtgtgagagagagagagggggggggggagacatgtgtgtaggtgcgagtgaaggtcagaaaaggcatctgatccctgaaacgagaattacaggaggttgagaaccacctgaccagttacagagaaccaaaatcagggtcctgtacaagagcaatatgctctcttaactgccccgacatctctccagcaccccagctttcttctgaggtcttgtatgtcatacataatgaactcagatagggcacacccagtgtagctcagcgtagccagtacagccacagctagagatttgaagaactgggccatccttccagctgggcactgtggcctggtttctgctcaattagagcttcaatcctcaagatgaaggaatcgagtctgctgggccatggagcaggcctgagtgcttgctctctgtgggcaagcatgtgtcctgtttgttaccacagctagaaacagatgcttctgctgagaagctgcctgcgaggaggctgttgatgcagagtcgtgaagcgtggcgaccgcggcaacccacatgacaaggctgacttacagactgtggcttcagtgctggggcaaacaacaaccaagaggtcctacagacactccagagccacaaggtcaccacatgtctggagcagatggatttcagtcaacacttctaccacccaagaagcttttgtggtgctgggtatagatgaactcaagtagcaaggttcgggctgtgcttgggaatcccggcaacagaagggtttgctggagtggtaccacaagcattgctgtagtgcaatttccatcttctatgtggagaaaagcccaagtacagactgtcaggacaaaaccaggcagcttccatccccaaaactgcccatgagtctccagccttggtaccctatggcctccgaaaccgcccaggggtgtgtgtatgtggtctctaatgaaaaacatcaagccaaaaatccagaaaggaatctgggcacaacctcccagtggccacaatccttccaggaagattttcttcagtaggctgaggtaaacagtcttacggaaagtgccatccagtatctccagtggtctggaagaccctgagaaacacttgctgaccaacatggtcatttgtctactcattactgcaggcgtttgttttttaagtgtgcatccgcctgcgcgtgcccgtgagcctgagcgtacgcgtgtgcgtgcgtgaggtgcggtgcggtgcggtgcggtgcgtgcatgcgttgcttgcgtgcgtgtgggcgggcgtgcaggcgtgcgtgcatgtgagagagagaacacatgccgcaggacacaaagaaaccagaggacttgcaaaagtcagttctctcaacaggtcagtcctagatacggatcttcggcagccttacccgctgagccaccacactggcccattctttcagtcatttctccatccatctggctctcctgaggtgagaaaccttggccctccaatccttgcagtcagcattggaagcagattgacagtgatgggcacataggagagggagcagtgccagatgacagggcaccgggagacattgcccatatcttacaaagggtgaagatccaaggactggtttgggagccttaggggatcagccagggcctctggtgtagcagagacccagcactcctggtcaactgtacctacagaggtttaatcatttctctttggtaggctgctatgaccaatggatgctttgaaaggtctgtactgacctgtggggctcacgcagaactgggcctagcaggtggggtttgaagtttggcagcctccgtgggaaggatgtgaggaggtagacaatgctctggagagactggagccctgaaaggggggcactggatgtttgctgctcagattgggggtgatggccactcctgggtcacaaagaaaggcagggacttctcatgggatcactcaggaaagagatctggagaacctggaaagagagattatcaggaaagtactccaaagccctctgggagcttttgctgagtctctaggttggtaccctaaagcttgccagggccacaaacctctcttggtgggattaagctgctgcaagggtcccagattttttttctttcacatttgagttgttacttatgggtggcacataaaattactcttgttttcccatcaacgtcgtagggtaggaacccaagatcggagaactgatttcttccatatagtcccaaattcacacccaagtgacttgcttcctctcttagctcctcccccaccatcaccacctcccagtaacactgtcatgctctggatccatcaccaagggcttgacccgatggttagttcagagcactcacgatctcacagtctctggaaagtcctgcatagacagaagtcccatcacttaatccactcgaggggacaagcaaatgaaccgtctcatcggaggatgaagaatcttactaccgggtcccgacatcagcttccatcctgctgccttgtcccaggaatgtcagacttaacacccacgtttccaacccaactgcatggctagtcccttaaaactcttcattccctccccagtctctctgcatctgtgtccatatctgtctaaagaaccatccttccgcaattggagctgtggccataaattttgcgtgtgtcatttatcggttgtttatgtcaaccatctcccttctctgttcctgttgtctgcctatcacctccatcctcatcaccctctgtccctatcatatatatatatatgtatatatatgtaaatatatatatacagttgatatgcaggaaatatatattcagtttatatgcaggatatatatatgcagttgatattgatatgcaagatatatatacagttgataggtaggatatatatgtgtatatgtatatattgtatatatatacagttaatatgcagaatatatatacagtttatatgcagaatatatatgcagattttaagtggactagcaagccccgagccctcaagaaccgctaggatccctgcccagtcatgttactgtcattggaagtcatcttctgtttccactccaccaccacagaaaagatccacttcatctgttgggcagggtggttgaggagaaccaagaccagggccctttaattctgtggaggaaccaaagacagctcctgctacataggagcctgtccggtggtatggggaccagggagaagttagaggtgtggaatacagggatagaatggtgtacaacgagggatcatggtgtaagggagggtactgtgaggacagtgtgtgaacagagtgtagacagtgagaagaacttggaggacagcatccgcagcatgggagagcaaaggaaggtgtgacgacattatgaagatattgtgggaactgcacgtgagtgtgaaagacagcatggggtagcaagggaggagctgtgggacactaagtgtataggagggaagtagcatgagacgctctagagcagttgttctcgaccttcccagagctgtatcctttaatacagttctcatgttgcggtgacccccagccataaaattatttcattgctactttgtaactgtaagtttgctaccgctatggagtatattggaaatacttgttggtatgcaggatatctgatattcagagtggctacccatggcataagaaccactgtgctaagtgggtagaagggccaccatggaaatagcatggggacactagaaagacagcatgatgagagtattgtgatagcattgggatggtgtggggtcttgtgaggatagggtggggacagaagagtagacagcataggtcgtcacagggacagtataggaacagtgtgaggacagtgtggacactgtggagatgttgtggctgaccttgaagagtgtgacagctgcactgtagtacacactgagcaggaagaggctgatgtagatgatgatggccgtccagaccccgtccagctccctgtcctgggagtcagcacaggtcttgtccagttccagccctggacaaagagggtagtcagtctctgtcccaacaaggctgggacaattccctctatggcaggtgcatcagcaatgaggtacccactggactgggccagtagattgtttctggggccagccttctgccctctccagaccagcagactacactctcccaactgctccaacccaagtcccggactcagccagacacaagatggcaatctggactgtgtaagaacccttcccacctgctccactcctcagatttggggctgtctgggctgaatcagagcctgtgaccactgaccctctgcctatgaccaagcccagaaagccagtgtaatggtggaccccaggcctagtgatgcctggccttcagagttccacactgggaagtgaattgggccactcagctatgtgggaaggggactgtcatctctatgggatgaaagcatgggtctgaaggtccagaagcagaatggcatgagagagtgtgtattgtgggacaagttgcctttggaatcctttggcagtgctatctgtctcagctgagccagatgtgaggaagagcctcagagaaggcctggtgccttgatgggtctgagttctgtactgggagctcctatgaggtctcggagtgtaaggcttgtgtctgtgctcatgcacaccagtgtacaagtctgtgtaaatgtcatgtgggttgaccgatggtcatcagactgctaggcactggagtcatctgatggctctgaattctgcattctgtgtcttcaagataagagacataggtatctagcccagaaaactagtctcaaggaggagagagggtcatggcaaaggtagacagacagaaattccagtgctttgacctgagatcctctccctgggcacaactgttcatcctggttgatctagagaagaaaatgacataagcctgacctccaatgggccatacctctgctgagcatcctctcatcagttttcctgtccatcttggtactgctgaccagatgggtcacacacaggtaatagcctggctcgtccagaagctgccaggcatgatcactgagctcctgaaggaagacagcttgaactataagacagatgtcgagtttcacataccagtgaacaaagctccagacttccaagacatgattgctggctcagggaagtagcccttgaccaaacaacccatgttgccatgggaaccaggaaagagatggacagggccatggctcttgctgcaaaggggggaagagatgtgaacatactgtccagcctggagaagtctttttctccatgcagccctgggtcttctaagatgggatctgctcctactcttcacgaacctagccagtttctgttttctctgaccccagcccctactcttagtctcaggaccttgcttttcacccccatccttacactgtaccccagccctgccagcatcgaatctggtcccaatgggttctttccttccaatctatagggttaactcccctgagcattcccactctcccctgttcctgtgaggccccaggatcagaattgtggaccacaaccccagaaataaaacccatggaatcccagcccccagagaccctccctgtgcacggcctccctcagtttagcaaagagttacttctggacccctgcctagcttctctctgcagccatatgacccactgcttataaacacagccagaagcgccagttccctttctcctctccacctggcttcactctgcactctgtactctcactccagacttcactttcctcctggagccacagacacttctgggctctagagagattgcatcagctggagagggaatggcagaggctgccaagtaggctggttagaggtcagacctgagagaaggtcttctccaaaaaggtggtcaggagaatggacataatcactcagccccaagcaatccaggaacactgggtgacagctagtctctacatcttcttctaagggtctcaagaggaccacttcacctacccctacaggaggtaacccagaccatgtctggactccccctggtctccccctaccccaaacactgaaaccaacagaagaaagaggaacctcaggaagtgtcccgtgtcacccagtttcgatcctgttcttagtctgtactgggttgggagaagtgtgatgttcacacctctggggcaaggactgtgaatcctggaaggatgagacagatctcagagctgggctgttagcagcccagcaccaatgcaaaaagagcagcagtcacaaggttccacacgtgaatgtagtcagcagagaagctggagaaagccacagcctagggagagcagtgagcttttccagacctaatagacggcagaacacaggaggatgaggagttgacagatcagccccaacagaggggcctgtctgttgcaaagaaaaggtgcctacctgcaacctggtgccaaccaggcagacaccagactttccacggacagaagccaagaccactaaagccgtgcccacctacagacaaccagagtaagcctcaaggagttaatgggatagacccggaaacctgagggtctagccaggcctagaggccggtggacccaggacagctgaaccaacagagaaaagaaaacccagtggagcaagggcagaggcatacagaattgagagagttggtaaagaggggatggggaacgttcacctgggaggactgatacacctattagaaagagctagagtcagagtggatgcccttgtgactcccggcattggatagcagatcccaagaacaaagctgaaagaaggtaaatttctcaagagaaagtcttccagaggaactatgggtaccaggcaataagtagtacatccgtaggagggaaccagacagtagtacatctgtaggaggggaccaggcagtacagctgcaggtagggaccaggcagtatatctgtaggagaggaccaggcagtatatctgtaggaggggaccaggcagtagtatacctgtaggaggggaccaggcagtatatctgtaggagaggaccaggcagtagtatatctgtaggagaggaccaggcagtatatctgtaggagaggaccaggcagtagtatatctgtaggaggggacaaggcagtacagctgcaggtaagctaaggacagtaagagtagtagagagccatgatgactccaaaagctcagaagacctggcagagcagctacagggaatccggggctggtggagttgggaggaccaagccaaagagctataggtaagccgaggctggtgaaggcacaaaaacaagctaaggagctacagagggggcaagggctgtggcaggtgtggctaagagaggtccagggcacccccaggaaccagaaagagctttacaggagttctagaggaggaaggagttggggagacaggctgggcatctgtaaagataaggtagcagttgtcacagtttgggtctcagagctgcccaggggattaggggaaaattctgagaagctgtgggagagtaggggatggtaggaatgtggaggaccagtcctagcagctgtggggaagctggggatggtaggaatgtgggggatcagtcctagcagttttggggggagctggggatggtaggaatgtgggggaccagacctagcaattttggggggagctggggatggtaggaatgttggggaccagtcctagcagctatgggaaagctggggatggtaggaatgtgggggaccagtcctagcagctatggggggagctgggatggtaggaatgtgggggaccagacctagcagtttttgagagctgggaatggtagcaatgtggggtccagtcctagcagctatggagtagctgtagatggtaggaatgtgggggaccagtcctagcagctgtggggaagctggggatggtaggaatgtgggggacaagacctagcagctatgggtgagctgtagatggtagaaatgtgggggaccagtcctagcagctgtggggaagctggggaatggtagaaatgtgtgggattgttcctagcagctatgggggagctggggatggtaggaatgtggaggaccagtcccagcagctatgtggggggctgtggatggtaggagtatgggggaccagtcctagcagctatgggagagctggggatggtaggaatgtgggggaccagtcctagcagctatgggagagctggggatggtaggaatgtgggggaccagtcctagcagctatgggagagctggggatggtaggaatgtgggggaccagtcctagcagctatgggagagctggggatggtaggaatgtgggggaccagtcctagcagctatgggagagctggggatggtaggaatgtggaggaccagtcctcacagctgtggggaagctggggatggtaggaatgtggaggatcagtcctagcagctatgggtgagctggggatggtaggaatgtgggggaccagtcctagcagctatgggagagctagggatggtaggaatgtggaggaccagtcctagcagctatgggagagctggggatggtaggaatgtgagggaccagtcctagcagctatgggagagctgggaatggtaggaatgtgggggaccagtcctagcagctatgggagagctggggatggtaggaatgtgggaggcctgtcctagcagctatgggagagttgaggatagtaggaatgtgggggaccagacctagcagctatgggagagctggggatggtagtagtatgggggaccagtcctagcagctatgggagagctgggaatggtaggagtgtggaggaccagtcctctcagctgtggggaagctggggatggtaggaatgtggggggcctgttctagcagctatgggagagctgggaatggtaggaatgtgggggaccagtcctagcagctatgggagagctggggatggtaggaatgtggaggaccagtcctctcagctgtggggaagctggggatggtaggaatgtgggaggcctgtcctagcagctatgggagagttgaggatagtaggaatgtgggggaccagacctagcagctgtgggggagctgggaatggtaggaatgtgggggaccagtcctagcagctatgggagagctgggaatggtaggaatgtgggggaccagtcctagcagctatgggagagctggggatggtaggaatgtgggggaccagtcctcccagctgtggggaagctggggatggtaggaatgtggaggaccagtcctctcagctgtggggaagctggggatggtaggaatgtgggaggcctgtcctagcagctatgggagagttgaggatagtaggaatgtgggggaccagacctagcagctgtgggggagctgggaatggtaggaatgtgggggaccagtcctagcagctatgggagagctgggaatggtaggaatgtgggggaccagtcctagcagctatgggagagctggggatggtaggaatgtgggggaccagtcctcacagctgtggggaagctggggatggtaggaatgtggaggaccagtcctagcagctatgggtgagctggggatggtaggaatgtgggggaccagtcctagcagctatgggagagctagggatggtaggaatgtgggggaccagtcctaggagctatgggagagctggggatggtaggaatgtgggggaccagtcctagcagctatgggagagctggtaatggtaggaatgtgggggaccagtcctagcagctatgggagagctggggatgataggaatgtgggggacctgtcctagcagctatgggagagctggggatggtaggaatgtgggggaccagtcctagcagctatgggagagctggggatggtgggaatgtgggggaccagtcctagcagctgtgggggagctggggatgataggaatatgggggacctgtcctagcagctatgggagagctggggatggtaggaatgtggaagaccagtcctcacagctgtggggaagctggggatggtaggaatgtggaggatcagtcctagcagctatgggtgagctggggatggtaggaatgtgggggaccagtcctagcagctatgggagagctagggatggtaggaatgtggaggaccagtcctagcagctatgggagagctggggatggtgggaatgtgggggaccagtcctagcagctgtgggggagctggggatgataggaatatgggggacctgtcctagcagctatgggagagctggggatggtaggaatgtggaggaccagtcctcacagctgtggggaagctggggatggtaggaatgtggaggatcagtcctagcagctatgggtgagctggggatggtaggaatgtgggggaccagtcctagcagctatgggagagctagggatggtaggaatgtggaggaccagtcctagcagctatgggagagctggggatggtaggaatgtgagggaccagtcctagcagctatgggagagctgggaatggtaggaatgtgggggaccagtcctagcagctatgggagagctggggatggtaggaatgtgggaggcctgtcctagcagctatgggagagttgaggatagtaggaatgtgggggaccagacctagcagctatgggagagctggggatggtagtagtatgggggaccagtcctagcagctatgggagagctgggaatggtaggaacgtggaggaccagtcctaggagctatgggagagctggggatggtaggaatgtgggggaccagtcctagcagctatgggagagctggtaatggtaggaatgtgggggaccagtcctagcagctatgggagagctggggatggtgggaatgtgggggaccagtcctagcagctgtgggggagctggggatgataggaatgtgggggacctgtcctagcagctaagggagagctggggatggtgggaatgtgggggaccagtcctcgcagctgtggggagctggggcaggtgggaatgtgagaaaacaatccttgagctatggaggagctggggatggcaaggatgaaaaggggcaaatcctagcagctagagggaagctggggcaggtgagggcgggtgtaaggaaccagacctagaaactatgggggaagtggagcaggtaaaaatgtgataaaccagttatgcagtccagaggctggtaggagtgtaagggagcagacatagtggctatggggaactgggatatatgggagtgtaagggaccagattcagtagctatggtggaacttgggagtgtagatgagcacgctgaaaagctatggtgcaactgcaacaggttgtcagggtgtaaagaaccagacccagcagccatgggaaacctggggaaagtagcgatgtgggggaccagatttggcacctataagggagctggggcatgtggacatatgaggggccagaagcagcagttatagggaaactttgaaatataggcaagtgtaccaagaagccgtagtggagctgaaacagatcctaggtcctatggaggagctgaagaaggtgggagtgtgagggaccaggccgagcatctgtggaagggctgaggcagggctctgggtcggatgggagtggcaccccagagaagccctagaagctctggcgatggagctgagcagttacagtggacttggggctggtgggatcgtaggagaccatgtagctgcagaagagctggagaaaacaggagtatgaaagacccagccaagtagccactgaagagctggggtgttattggggtgtgtggggacacagtcccagcaggtttatagaggttggagccttggcagtatgtgcagtaccaaacccagcagcttggttcaggggcttgagtagaggcaggctaatggggtccacggtaaccctaggcacttaggggactggattgcgaatcttcaggggagctggaacaggcaaagttaaaaggaatcaagcacctggaagaaagcaaggaaagataggattgatggggatccaagaaactcccaggaagtaaccccagcagggacatctgggagctcagttcagacactgaatcaaaagcacagaggaaggagaggtggtaggtttccaagctatcctgtccaggccaatggagcagccaggaaggagggaaggagaccaacaggaatggggcagctgtagccagcagggtgtgagagacagggatgaggctaggtggctagcaagaagggcaacttagtgggagaggggtgaattaaccaccctgacctcatgctgacaggggctgagcaacagacaaaagaataagaaagccaagagctcatggctggaactattctggctgtctgctctgactgtgttgaaggggctaagcacctgttagctaatgaggctaaaacagttaaatgagcaaagtagagcaaaaagctcccacagcggagagcatgggagaacgggagactgtgagatcctcggggggtctaggagtttatctcagagtgaagaacagtgaaaagctctgcttgggagttctttggggaatggcgatcatcctgggaactcccttatagacctcatggcatggaggagagcaggagctcaggcagacagagtagctgtgtgtgagctggataagaaagaaaagagacaacagggagagaagagaaaagggatgggaaaggactcagggctctactgaattcaggcagaagagcttggcttcaggatgctgggggccaaggaaggtgtctgattgagcaggaacatagtcaggaaaagaccctggtgctcacattcccagacaaatcttacaggttaaagttctagtatcagaacccctcgctcagatcctaggggcttatgggaacataaggcaggaagtgaaacctcttaggacagcacgaagtagcctgtgttggcccacagaagaagagcaaggtaactctcagagtttgagcaggggattgaggaaggtagtgtacaggagaggcagaaagaccagaaaggtccccagagtaagaatgaatcaagaatttatgtgtggtttggttcgatgaaggcaaaggcagggaagatagatgagaaactgatcctctttcacaaccaagaactcattgttcagtgtgagttttgatatatagaaggggggggaatgtgctattaaaagtaaaaaagaatgaaccagattcaaaagggaaaggggactaaatgtcttcctgaataatgcagcatacattcctatttcaagagctaccggcaagagaaagggacacttctgggatgtgcccagtaacattagcactgtcagagagaacccagggcagtgcgaagggtgaggtgggggaggaaggtgtctgcactcatcagcgtctcatcagggggcactgagctgtgtagaacaagagtggccagctaggtcaagacagaaaggatgcccacacacagaaggtgtagggtagagggttggtagtaatccccaggaagcagggagcaaggtccaaggagagctaaagtcacggatagagacctagggcacagatttaggagccagagtttgtgtaatgttagtagattcagtaggggcttctgaagggcctcatcactgaaagatcaaggctcctagggctggagagttggctcagtggttgctgctcttccagaggacccaagtccagttcccaacaaccacatggcatcttacaactatctgtaagaaactccagtttctcgagattcaataccctcttctaacagcacaggcatcaggcacacacatagtacacatagtcatacatctaaaataaaatacctaaaaaaaaattaaggtcagagtgcagggtctagaagtggaagctgctgacaccacttaccccagagcaacttgagaagacacagtctttttagagcaaagctaaggccagagcctctccaaatatctgaggccacgcatgttggaaaagctcacactccctcctctcttgcagcccaaacaacagccccatctgtctatccactggctcctggatgtggtgatacaaccagctccacggtgactctgggatgcctggtcaagggctatttccctgagccagtcaccgtgacctggaactctggagccctgtccagcgatgtgcacacctttccagctgtcctgcagtctgggctctacactctcaccagctcagtgacctccagcacctggcccagccagaccgtcacctgcaacgtagcccacccggccagcagcaccaaggtggacaagaaagttggtgagaggacaaccaggggacgaggggctcactagacgtgaggataaggcattagattgcctacaccaaccagggtgggcagacatcaccagggagggggcctcagcccgggagacactgtctctgcctccctcctggaggcctcctggaggcctctgcctatggccacccaccccctaagacatgatcctctggtatagatgtctgtgtcatgcataggatcataccagggacaaactttcctctctggtttggtgccttctctccttgaaaacccagtaacatccagtcttctctctacagagcgcagaaatggcggcattggacacaaatgccctacatgccctacatgtcacaaatgcccaggtaagtcactagacctggaccccagctccacaatgatggcaagagctgtaagcatcccagcactgcaggataagccacgtactgacccatttctatctctcctcatcagttcctgaactcttgggtggaccatctgtcttcatcttcccgccaaagcccaaggacatcctcttgatctcccagaacgccaaggtcacgtgtgtggtggtggatgtgagcgaggaggagccggacgtccagttcagctggtttgtgaacaacgtagaagtacacacagctcagacacaaccccgtgaggagcagtacaacagcaccttcagagtggtcagtgccctccccatccagcaccaggactggatgagcggcaaggagttcaaatgcaaggtcaacaacaaagccctcccaagccccatcgagaaaaccatctcaaaacccaaaggtgagagctgcaggccgactgcctggggactgggataggtataagaatgaatgcccgtgtggacggccatgacctctgtgtctgtttctatccccacagggctagtcagaaaaccacaggtatacgtcatgggtccaccgacagagcagttgactgagcaaacggtcagtttgacctgcttgacctcaggcttcctccctaacgacatcggtgtggagtggaccagcaacgggcatatagaaaagaactacaagaacaccgagccagtgatggactctgacggttctttcttcatgtacagcaagctcaatgtggaaaggagcaggtgggatagcagagcgcccttcgtctgctccgtggtccacgagggtctgcacaatcaccacgtggagaagagcatctcccggcctccgggtaaatgagcacggcacccagaaagctctcaggtcctaagggacactgacacccatctccacccttcccttgtgtaaataaagcacccagcactgccctgggaccctgcaaaactgtcctggttctttccggggtatagagcctaggtcacgggctttaaggtctggctggggtttaaggccagagttgtcttcaggaagagagtgaggtttccacactgccagactcagagctcatgagtcatcagggcctggagtgttggggcttagctttaggaagtgcctattccttgacttcaaactaaccagcagctgccagacggagagatacacctaggaaacctccaagggaagaaacacacaaactccaccaccctctgcctgttcctatccccatgtcccactcctctgcctatgggtttctctgagtctattgcacacatggccatgggcgtgccagagacccttgctatccctacactcaactaaacccaggcagcttttcatgggctaggtctgcacacccatacagactgcccactcatgcctgtgccacgtgagactgaggcagatggctcttgccgcccaaagggagggtctgttagccacatgcatactgaatcctgacccattcaaatcagcctgccgaacatcatccagtccgtatagcacatgtatccacgtgcacatgtgcacacacatttaacacaccaggactccgcctgtgtgccctgcacagcacctacacccagcagtgtatcaggatacccacaaccaccacttgagtgcccacgtttctgccatcacaaccagacacacctttccccttctaaggtcactgcattctaggctcagcacaagtcctctgaagccagatccgtctctggtacctcagggtcacgcttcaaccccacatgaattatacaacccagagccataatggtctgagtcacttcacactctggaattttctcaagttcaggcaagaccaggcacaggctccgctggtgattgagggacaggtaaagggtcagaccagctgtatagccactgtccactggggtcacaggccctgctgacccttcaccttctcctgtactgcaaacagagagggcccttgcacaatccaggccgccatgaggtccactgtgtctggcaaaccccaaggccttatccaactcagccggagggaacttagactgatgtcccagagggaaaagaaaggaaagtagggagtagaaagtctcccagggagactctgctggcccagcccaaatggagctttctcctctgccacatggggaattgctcccagccccccactttattgggacaaattctgactgccctctctgtccagggctagaagtggatgatgattgtgctgaggctcaggacggggagctggacgggctctggacgaccatcaccatcttcatcagcctcttcctgctcagtgtgtgctacagtgcctccatcacactcttcaaggtcagccacaccatcccccaccatctgctgtgatgcctgtgtcaaccctgcgatgtcctcacactcctctcctgacgtagtaggatgttcccttgctgtccccactctgccccacacaccattcccaccgttccctgagccgtcccacattgctctgtgtggctacccatggcgtccatactgtctgacattctatctctcttgctgtcctatgtgatctccatactgtcttacgaaacctccttgcatgccacactacccttcatgacgtccctgctatctaccatgctacccctctgggtgtccccatcagcctcaccatgtattctttgagctatcctcataccatctcaacctcaactcccacgatgtctccacaccggctcctagtctatgtcaccctgaccccttgccatccccagtctcctgcctgtatgaaaggaactgcaggagggacgggcctctgtcttgcccacagggctgaagggcctaagcatgggtgtgttctctgacttactcccacctccccacaggtaaagtggatcttctcctcagtggtggagctgaagcagacaatctcccctgactacagaaacatgattggtcaaggagcctaggccacttcctctgggatgagcttcctgggccccgcacaaccccatccatcctactgtgcagcctaatgtggaggccacactgccgtctgacagtgccaccctctagccctgtgactctgatccagaactctagactgtcttccttttggaggatcatgtggacaatgagctataccccagacccaaacagcacctccacagcagttgccaggaaactaactggttgggaccagaagaaccatctctaggatgtttgcctcagaggagctgggagtccacggtgcctgagtcgagctccatgggaatcagccgtgtctgaaatgggtcttcccagaaagagcaatgttttcagatccttgaaaggaaacatctgctaggaagaccatggtcgccacagccccaaagagtcacttcactctggtagcctttgaaccagttatatctggacaccttctttcccggtacttctgtgaaccctgggctgagtaaggggtttatgtttctcaaactgttgggatgagcctccccgagatgaagctccttgtgcagtcttctcttcccgaaacccactcaacatgctggactcttgggttcaggatccgatccgaagacaccattgacgacgcaacctcaagacaaggccactgtcacctccatagagactccatccacactctgcagggacaggaggactgctttgtgtaacctccgcaaagccctagcagggacaagtgcacagaccactgagtattggtgaggtgaccaggcaggaaaacctccaggagagggccctgatgagaagattcatattgggctcaaaaaatgggatggggggaggggggcgggtgggaaagaacagtgggcagggtgtgaacagatgattagaagacagtcacagtgccgcagatctgccctgcaggcctgctttccagactggaccacttacagcagaaaacaacagttacagtaagcatctaggagagtggacctggaataccagggctgctgtggccagtggagagtagccctgcatctacttctccattacctctcatggccaataagaagccagagcatccaggcagaaagaaagagtgtgcgtttctgtgactggtaggaaatgcttagagaacttggatctttaaaacagcttttttctagactgtgaatgtctttaagcactctctttcctctccattccctccctctctctttctctctctctctctctctctctctctctctctctctctctctctctctctgtgtgtgtgtgtgtgtgtgtgtgtgtgtgtgtgtgtgtgtgtgcactcacacacactgttgttttggcattttaaacaataaaacattcttttaacattttgtatctcatggtgtcccttcttaatggattagccctaacaccaaggaacagggcacagttaacagatcaattagccatgcacatccctcctgaccctgtcctcccagggttccctcagtgggtccctcatggctgggttccagccctaccagagccacaaaaagcttgggcatattcctccacacacacagcttttttccccagctggagactgctctgctgccatgggcaggctgtggagcagggctgatgcccagggtagaccctaggctagccagacaaaggtcccatgacagcagagaagcatgtgcctctcactggccttgggctgctacagagtcagcaaaggacatggatccagctacctccacagctggtgctcattgtctcaagccatgtccagagaagttccagatcaggcattgacagggtggagagctctctccttggttggtaggtgtcttctcctccatgtgacctcagagccccccccctttctgtgtgtgtgtgtgtatgtgtgtgtgtgcgcgcgcgcgcgcgcgcgtcctagcctcttctcataagtgcacagtcaggccggaagaggtgcatcctagccctaatcataacttaccagtttatgatcctgtctgcaaacataggcatagtctgaggtcctggtgatttaaatgtcaattggtgagtcttctggggcttcctacatacaatgccccttccccatgccaacatcccaaagtctcacccatccagcattcagctctatcccaagtcacctccaaaggcctgctagtcaagtaaggatcagatcgtgtggggttcgtcctgagataggattcagccatggtttccaggaggaaggggcaggagagaggcacaggggagagacgtataccgtgatgaactggacagactgataatgtgctgtccagaagaaagctgagggcaaacaggggcccctcccacttacactgaggtgacagttcctaagggagagtgagggatttgtagagagaagtggaggttccacagagttggagaagcaaaagattactagaggtagcctggtgtttgcaatgtctgttttctgttatggttgacatcaggattccatgctactctgtagatcaagggatacaggttccacatctttgtgtggcactgtggtggaggggcttgggcccagatactcccgggacatggaaaatacagacatcggcaggggaagaaatgggatgattcacaaccaaaggcctcctcatccgatgcttactgatctccgagagcaggagtcgggtgctggctgggcagttatcatctcccagtatttcccaggtggcatttagtagctgagacatcttcagattgtggccttggctgttagacactctatctgtttgggtctgtgtaggtgatggtggaggctgaatgaaggactggacaagggacaaaaggatcaggtcaacaaagctgcagcagagacaggagccaacctgaccaacaccactgtggcttccatgggacagttctgttttagccaggacagaagggaacagagctgcgtgaatggcattactcctatgggagtcacacagacaggctaatcacccagacaacaccaactggccagtgagaccagtgagatcctgcccacgcttcctcttaggtctggctctgtttctctagttgtcttccctggagcaaatgttgggaattgagcccatatcctctgcaagaccagtaaatgttaactactgaggcatttctccagccctgcctcaacctcttactggaagatggtcccaaaccaaaactgacggcatggtctcagaaagtacagattcgccacctccaaacccttctctcatgtctgtctgtctgtctgtctgtctgtatgtatgtatgtatgtatggccctgcaccatcacccaccacctcctggtgtcctgcagcaggggcttcccacagcaggacgtaccatagctcccaccccttacacctccatcagcactataaacatatagacacaagtgccataaccctggacacaccttctgaccccgcccccatctctgagaccaactgatctcaggctgtgttttactgaatgtgtccattcggtaaaagctatctgagtcctgccctcctgacctctatagtgtgacatccatggtgtgtgtcctgtgtcataacacgtaggtatgtcataccgtgtgttaccacatatgatatgtgtgtgaaacatccccacatgatgcctgtggtggacatgtatatatatatcttttatgacttctataggggacatcaattgcagaatacctgtgctagccagtagccatgactgaccagacagctactgacacttgacccacttgcattctgtcacagtctgggaatcataacatgacacaaacgccgattgtagcaccaggtcatgggcctgcatgagacttgacatgtgtacacacatgacatgtgtacacacaaaccacacgaaaaagtgtctcggaaaacacacacagacacatccacatgagcatcatagtgtggtcacagacatgtccacatgggcatcacagtgtggtatcatgtagtagccacagcatacatgacacagtcacacaagttcttacaagaacatacatgtctgccagttcccagaactcctggcctcaggctcagcactggccaccctggcccagcacacttcccatgcttcaagctttgcacacacagatccactgtattcccttcctgtgtttaccccattaccttcagcacaccacccacctctcttccatgactgcccccatcccacctagcacggcgccccactactgtgctagctttgttcactcagtgaccatgtgtgtccatcttccagtgaagcttgagctctggggacaagaacgtccctccagattcatgttcctgcagttctatccaactgttcagcatctgtgatgaagtcacaccaagtccctcaccccctaactagtcttctaatctggcatagttatgtgctgggaactaagtagatggtcaaagtaggatatgatgctggccaatggtgcagaccagtaggtccatgtgctgacccttcaactctaaagtcttccccacgcctaccatgtagccataagatctttcccccaaggcagggtacagacaccacatagaggaagaagaccaagtggatgggccccccatagcaggtatgggagagtcaggctgacatagcaagtgtgggagagtcaggctgccatagcaagtgtgggagagtcaggctgccatagcaagtgtgggagagtcaggctgacatagcaagtgtgggagagtcaggctgacatagcaagtgtgggagagtcaggctgccatagcaagtgtgggagagtcaggctgacatagcaagtgtgggagagtcaggctgacatagcaagtgtgggagagtcaggctgacatagcaagtgtgggagagtcaggctgccgggcacaaaggatatgctggacttagggaagccatcctccctgttttctgcccaagcacatatgtatcctactatcagctctctcattgttcactccatactcaagcatctgcccataggaggaagacctcagcctcaagtcaggatgtacatgagagcagccacagagtgagtccatatagttctgttcttttgccccaaaatgtcatgttccagaactacttgttcctttgacctagaccccagaaaagagaccagacactatagtagacacggaagtaagaacaacacagtgctgttgtttctctgctggcaaaggttgttgccacacttatccctggcaaagatataaaacagatgtcatcaaaatgccagtcctggttgtaaatacatatttagaaatgtctgtgtgtgtgtgtgtgtgtgtgtgtgtgtgtgtgtgtgtgtgtgtgtgtgtgtggagacaacaggtaaaaaaataaagacgatgttagagggaggaaattaaagttggaaatgatataatcatatttttattggataatttatatttacatttcaaatgttattccttttccaggtttctcgtccataagccccctgtcccatctccctcccccttcttctataagggtgttccccctctccaaccacaccccattcccgcctccctgccctgacatttccctgcattggggtgggggggatggggttccagccttggcaggaccaaggacttctcctcccattggtacccaacaaggccatcctctgctacacatgcagctggagccatgggtctgttcatatgtacactttgggtagtggtttagtccctgggagctctggttggttagtattgtttgttcttatggggttgcaaaacccttcagctccttcaatcctttctctaactcttccaacagggaccccatgctcagttcaatggtttgctgctaacatccgcctctgtatttgacacactctggctaagcctctcaggagacggctatatcaggctcctgtcaacatgcacttattagcttaatcaataatgtctagttatggtgggtgtatatatatggactggatccccaggtggggcaggctctgaatgtccattccttcagtctctactcagaaatttgtctcaatatctcctcctgtgcatatttttgttcccccttttaagaaggactgaagcatctgcaccttggtcgtcattcttcttgagcttcatgtggtctgtggattgtatcttgggtacttcaagcttctgggctaatttccacttatcaatgagtgcataccatgtgtgtgtttctgtgattgggttaccacactcaggatgatattttctacttccatccatttgcctacagatttcatgaagttattgtttttgatagctaagcattcattgtatagatgtaccacattttctgtatccattcctctgttgaagggcatctgggttctttccagcttctggctattataaataaggctgcaatgaacatagtggagcacgtgtccttgttatatgtcggggcatcttttgggtatatgcccaagagaagtatatctgggtcctcaggtagttcaatgtccaattttctgaggaacctccagactgatttccagagtgtttgtaccagcttgcaatcccaccaacaatggaggagtgttcctctttctccacatcctcgccagcatctgctgtcacctgagttttttttttttttttttagagagacatggaagaagattgtttgttggtctatatttatggcttgctcagcctgtggttttgttttttattaacttgagtatttcttatatacatttcgagtgttattccctttcccagtttccgggcaaacattcccctcccccctctccttccttatgggtgttcccctccccatcctccccccattgccgccctccccccaacagtctagttcactgggggttcaatcttagcaggacccagggcttccccttccactggtgctcttactaggatattcattgctacctatgaggtcagagtccagggtcagtccatgtatagtctttaggtagtggcttagtccctggaagctctggttgcttgacattgttgtacttttggggtctcgagccccttcaagctcttccagttctttctctgattccttcaacgggggtcctattctcagttcagtggtttgctgctggcattcgcctctgtatttgctctattctggctgtgtctctcaggagcgatctacatccagctcctgtcggcctgcacttctttgcttcatccatcttgtctaattggatggctgtatatgtatgggccatatgtggggcaggctctgaatgggtgttccttctgtgtctgttttaatctttgcctctctcttccctgccaagggtattcttgttccccttttaaagaaggagtgaagcattcacattttgatcatccgtcttgagtttcatttgttctaggcatctagggtaattcaagcatttgggctaatagccacttatcaatgagtgcataccatgtgtgcttttctgtgattgggttacctcactcagtcacctgagtttttgatcttagctattctgactggtgtgaggtggaatctctgggttgttttgatttgcatttccctgatgactaaggatgttgagcatttctttgggtacttctgagccattcgatattcctcagctgagaattctttgattacctttgtaccccattttaataggattatttgactctctggagtctaatttcttcagttctttgtatatattggaaattagccctctatcagatgtatgattgataaaaaatcttttccgatctgttggttgccattttgtcctaatgacagtgtcctttgtcttacagaagctttgcagttttatgaggtcccatttgtcgattcttgatcttacaacataagccattggtgttttgttcaggaaattttccccagttcccatgtgttcgagggttcttcccactttttcttctattagtttgaatatatatgattgcatgtggaggtccttgatccacttggacttaagctttgtacatggtgataaaaatggatcaatttgcattcttctacatgctgacctccagttaaaccagcgccatttgttgaaaatgctaatttttgtccattgaatgattttagatcctttgtcaaagatcaagtgaccatacttgtgtgggttcatttctgggtactcaattctattccattgatcttcctgcctatctctgtacgaatatcacacagtttttatcactattgctctgtagtactgcttgaggtcatggatggtgattcccccagaagttcttttatggttgaggatagttttcgccatcctggattttttgttattccaaatgaatttgcaaattgctctttctaactctatgaaaaattgagttggaattttgatggggattccattgaatctgtagattgctttaggcaaaatggccatttttactatattaatccagcctatccatgagcatgggtgatctttccatcttctgagatcttcctcaatttctttcttcagaaactcgaagttcttatcatacagatctttcacttgcttggttaaagtcacaccaaggtattttatggtatatgtgactattgtgtcataatttctttctcagtcttttatccttggagtagaggaaggttactgattggtttgagttaattttatacccagccactttgctgaagttgtttgtcaggttaagtagtctcttgtggaacttttcgggtcacttaactatatactatcttatcacctgcaaatagaggtattttgacttcttcctttccaatttgtatctatttgacctccttttgttgtctgatttctctgggtaggactttgaatgctatattgaataagtaggaaaagagtaggcagccttgtctagttcaattttagtgggattattcaagtttctctcgatttagtttaatgttggctactggcttgctgtatattacttttacattttatattactttttttatgtttaggtataggctttgaattattgatctgtccatgacttttatcatgaaggggtgttgaattttgacaaatgctttctctgcatctaatgaaatgatcatgtggtttctatctttgagtttgtttatatagtggatcacgttgatggttttctgtatattaaaccatccctgcaaccctgggatgaagcctacttgatcatgatggatgattgttttgatgtattcttagatttggtttgtgagaattttattgagtatttttacgtccatattcgtaagggaagttggtctgaagttctctttctttgtcgagtcttgatgtggattaggtataagcataattgtggcttaatacaaggaattgggtagtgctccttctgtttctattttctggaatagtttgggcatagtttagtatgaggtcttctataaaggtctgatagaattctgaactaaacccatcctctcctgggcttttttttttttttagttggagacttttaataactgctcctatttctttagaagttatggtactgtttagatggtttatctgaccctgatttaactttggtacctggtatccatctagaaaattgtacatttcctccagattttccagttttgttgaacttaagtttttgtaatagaatctgatgatttttttaatttcctcggattctgttatttctcccttttcagttctgactttgttaatttggatacgttatctgtgccctctgattagtctggctgaggatttatctatcttgttgcttttctcaaagaagcagctcctggttctttgtatagtcctttttgttactacctggttgatttcagccctgagtttgaagggctcttcaaactcctctactcctcttgggtgtatttgcttctttttgttctagagcttttaggtgtgctgtcaacctactaatgtatgctctcccctgtttctttttggaggcactcagagctatgagttttcctcttagcactgctttcatttgtgttccataagtttgggtatgttgggccttcattttcactaaattctaaaaagtctttaatttctttctttatttcttccttgaccaagttatcattgagtagagcgttgttcaacttccatgtatatgtgggctttctgttgtttttgttgttattgaagaccagccttagtccatggtgatctgataggatgcatgggattactgcaatcttcttgtatctgttgaggcctgttttgtgacagattatatggtcaattttggagaagctaccatgaggtgctgagaagaaggtatattcttttgttttaggataaaatgttctataaatatctgttaaatccatttggttcataacttgttagtttctctatgtctctgtttggtttctgtttccattatctgtccattgatgagagtgggatgttgaaatctcctactattattgtgtgaggcgcaatgtgtgctttgggttttagtaaggcttcttttatgaatgtaagtacctttgcatttggagcatagatattcaggattgagagttcatcttggtggatttttcctttgatggatgtgaagtgtcctttcttatcttttttgatcacttttggttgaaagtcgattttattcaatattagaatggttactccagcttgcttcttcagaccatttgaggtagtgtctgtctttgtctctgaggtgtgttttctgtatgcagcaaaatgctgggtcctctttacatgtccagtctgttactctatgtctttttattgggaaattgagttcattgatgttaagagatattaaggaatagtgattgttctttcctgtttatatttgttagaggtagaattgtatttgtggggctttcttcttttgggtttgttgcaagaagattactttcttgctttttctagggcataatttcctttattgtgttggagttttccatgtattatcctttttaggactgtgtttgtggaaagatattgtgtaaatttggttttctcacggaatatcttggtttctctatctatgttaattgagagttttgctggatatagtagcctggcctggcatttgtgttctcttagggtctgtatgatatctgcccaggatcttctggcttttcatagtctctggtaagaagtctgctataattatgataggtcttcctttgtatgttacttgaccttttttccttactgcttttaatattctttctttgttttgtgcatttggtgttttgacttttatgtgatggaaggaatttcttttctagttcaatctatttggagttctgtaggcttcttatatgtttatgggcatctctttctttaggttagggaaattttcttctataatttttgttgaagatatttactggccctttaagttgagagtcctcactctcttctatacctattatccttaggcttgatcttctcattgtgtcctagatttcctggatgttttaggttaggaactttctgcattttacattatctttgatggttgttttctatggtatcttctgccctgagattctctcttctatttattgtattctgttggggattctttgcatctatgactcctgatctcttccctaggttttctatctccagggttgtctccctttgtgatttctttattgtttctgtttccgtttttagatcctggatggttttgttcaattccttcacctgtttgattgtgttttcctgtaattctttaaggggtttttgtattttctctttacaggcttctacttgtgtttcctctttaagggcttctacttgtttatctatgttgtcctgtatttctttaaggaagttacttatgtccttcttaaagtcctctatcaccatcatgagatgtgatttttaaatccaaatcttgcttttcctgtgtgtttggatccagtatttgctttggtgtgagaactgggctctaatgatgccaagtgtccttagtttctctttcttaggtgctgcgcttgcctcttgccatcaggttgtctctggtgttagattgtcttgctgtctctgacactggcttgaccctcctgtaagcctgtgtgtcagcactcctgtagacctgttttctttcagctggatctgggaacagagagctgctcctgggtttgtgtgtcctgaggccaccaggcaggtcgcttggagcagaagtgttggtcttacctctgctctcaggtgtgtcagcacttctggcaactggctttcagctctggacacaggcagaaaccagaagatttctgcccctgactgctcctagcttcctatgtccagagggcacagagggcactaggtgggttcctcttggtccatgaatgtcagcagaagtagttgtctcctctgagctctcaggactgtccacacttttgagagtccatctctctcccccacaggatttgggaacagagagctgtgggagcggttcagctccgggtgcaggtagaaaccaaaagtatcctgtactagacttctactgcctttattgatataaccatattttaatcccaaaagcaaaaataaatgctttatttctggtcttgagctaagggtatagttcaattgttagagtacttgtctgtaatgcaggagccctggatctgatctccattacagaataaaccaaatgtggtaatgcatgcctgcaatcccaaatcccaaatctccaaaggcgtacacaggaggatgagactttcgaagtcattcttgtctacatagcaaattagagaccaaccttatctttaaaaatagtaataatcctgatcttccacttgaagtaaatgtatccagtaactgtacctgataccattctatgttagattttgtttcagggtttcgaagataagttctccagagaagcacaagtagtgggagatggcggagagagggctggtagatgaacccataaacaacaaacaacagagctggaggacaattaggatgatatgtagttagaaacagagggacagcatataagagacaacagggagataacacataagagacaacacagggataacacacaaaagacagaagagagataatacataagagacaacagagggacagcgcataagagacaacagggagataacacgtaagagacaacagagggataacacataaagacttagagttttatggttcgccttgactagattaaggaatgaatgcctgtggaggtgtctatgaaggactttccagaagtgttaggtcttagggggctctgacttagccctttggtggagtgagaatgtggtggcattatagaaaaatgctgaacagtaagaagtccaggtggaggaagcagattactgggggtgtgcatgggccattacatctgaccctggacactacattccctttatctctacttcccatcagtcaagaaataaatagcctcttccacacaaccccactgtcattatggccctaagcacataagccccccaccctttaagtttctttgaggtatctggtcatcctggctcccagctccaagtcacccaaagggttcatataggcaagcatttccacctctaccgtgttccatcacaaaccactggctatttgagaaatttcagacagctaaagaatggttctcttagcactgatggccttgcattcaagagacttgcctgctggtttgcaaacctagaggctatggcactgaacttggacacccggtggcgtgctgcttttggcatagagaaagctgacatccagcagctaagtgactgctcctgagctttggaactcgttctcctgtatcaccctctacatccaactcttctcagcttgtcttctcaatatttccactgtccctcatcaccttagattcttgtagacgctgccctcaatggcttactggctcctcaactacttcctgccactgtcgccctcagggctggaaacctggagccttgtctgctcttggcacagccacacagcttactctacccatgacaaataaggagacttggagaccatttggggaaagcctttatcagggcctaatgggtgcacacttggatcaggagtcatccattggagagaagcctcaaggaatagtggggaacatactgtatctagagacagtatagggtcatgatggcgtggattatactccccacaaagacagccctgcatgtgctctgcttccagtctcaccaatcacaaccctcccgtatgaacccatcacagcccttgcacagattgcaggtctcaaatatgttcacctttctttctgacataaccaggattttttttaatttgcttgcgtgtttattatttctatttattttattcattttttatttattattttacatcccactcactacccctctccccatcatcccctcccaagatccttcccccatcccctctccctttcacctctgagccagtggtgccccctccgtgtatctcccaaccctaataatcaggtggtttgagccaccagggaagatgctcttcttcctttctgaccttgagagctgctattccaaggtcctctggagctgtgtgtgtgaagtcacctggaggtcataggtggagtggagttttaaggccatggtagaggctggagccatagtagttggaacaaggctgtggtttcagcagcagccatgattgttgtatactttgcagctcaaatatggtctcctcagggctctgtgaggtattcaaagcacctagaatcccatgatgacacttccaccagtctctaaaagagacctaagactactagatatagaaaaaggccaacttaagtacatcaaaaggtcaagccttctggcccctaatggctcattttacatgaagaaaaggtgaccattacactatgcccaataaagacatgttacatttacactacggtccttggcatcccttagcagatgatcctagggagagctgagcaatctcgtccatctcacctccacccagtcaccaaaataacactgttctaaggcacacttctgagacttacagagctactagagagttgggggtagcagtaagacctttccctggccctcaagatacgttcacacccacatcacatatatgagttcgcatacactaacacacacagcacatcttggacatggcccattcaggaacagatctgtcatgatcgcttgagttaaggaaccactcaagggaatgactaaaggaggatcccactggagtcctggcccacaggaggaggtggaataaaggttaggtagggcaagacaagggcactaaagccactatgctgctggggccactgtggacactgatggccagaaatggaatgatcagcctgtaggcaggaggggggagggaggatgattcctgaaaaccagaagagtcaccgtggagtctgaaccaggaaggagagagagctcccagtgtaaccctaaggcttaagtagttgcaactgcctcctctccttccagaggaccacccactgccacctagcatagcactctgaggactcagaaccagcagcccagcataagctgagtgtcaaagaagaatcaggcccaagcaggctggacacaaagtttcttggtcctcaggctatgagggagatggagtccttcccactattcggggcacaccacagacagcagcacctgatccagttggagcaaaggctcctcacccctgtgttttccctcagaaccacaagtctttccaggaaactctgtatttacccctcagattcccacccaggtctgttaggctaaaggccaagcctgtcacctcagactatctgaaagagataaaaccaggcaagacccccaattccctcagatctcacaccccgtgttcccaaagtccctaactaactttcctggggccagcccggggcctacctggttcttccactgtcagttagctctctgatgtcttccaaatacaattaaacacccttctgtgggaagtcagacttggcaaagcctaagtcccccagtcccttgcatcccannnnnnnnnnnnnnnnnnnnnnnnnnnnnnnnnnnnnnnnnnnnnnnnnnnnnnnnnnnnnnnnnnnnnnnnnnnnnnnnnnnnnnnnnnnnnnnnnnnnnnnnnnnnnnnnnnnnnnnnnnnnnnnnnngggaagctgctgggcccacacaccatctttaccctctccccttccctcagtgcagacgtagaccacaggcctggaagagacgttagctgtttctatggtgttccatgagacccagttactccccagatgtgctctgtccttgccagagtagcaagtagaggaccccaagccgaagggcggccacttgtgagtgattaccagggaagcccactgtctctagcatgccagctccaaagctgagacaggaaccagggggcctctatcagaggccctgcgtgtcatatcgtgcccacaggctgttcctctttgtgtatcgttaataacttacaacgtgactgccacactgccccgaaggactgccaagggaacagaaaaggcaatggcttgagtccagtcccttttcagggcagtagcactccaaaggggcaggcatcgtgactgcaggaacatgcaagtttctaacgtgagagctgtgcagaacaccagacaacgaaaagtgccctgaccagagcgtgcaggtgtgtctcctagaaagaggcctcacctgagacgccactgtcccttagtcaacttcccaagaacagaataaaaaagggaacttccaaggctgctaaggccgggggttcccaccccacttttagctgagggcactgaggcagagcggcccctaggtactaccatctgggcacgaatgcaataatggttactaaagattcacaacgtctgggagcctgcacagggacaggagatggctgcagatgagaagagcctggctagccacagccacttaccagcggacctcaggtatcatagcctgtgggaccctgagccaaagggtttgcccaaggagaatgggcaaacaggttacagggtcctggatggggaagggggcacctgggctgccttctaacaaggacagagtctcttggtcattgcctgtccttcagctgtcactcctctgcattaaggcacacagttattagacactactaccgctatccacaaagacaggggactgtggatctcaaccagacatggctgaaccaagagaaactgaagatgtcgtgagaagctcagaaaacgccaggagaagctgaataggaatctgcctgcaaaccatcagggcaaggaggcaataacaagtgacagagccaacgagtgacagcaaggaattgccctgtgatgaactaacaacaaagctgggctgacctgggctaagctaggagtgggatctgtgctgcactgggctggaaggagccgggatgagccaagcaaagtgggttggactgagttgaattggcctggactagtttgtgttgggctgggctggcctggaataggtaggctaaaccagcttaaactagggtaggctgggcttaactgaatcagactaggctagactaagcagaactgggctgggttgaactgggctacactagcctggtctgatctaggataggctgggctaagctgagctggactggctggactgggctgagctaagttgcactggacagagctgggctggagtggactggactgggttggattgggctggactgggctgggctaggctgagctaaattgcactggacagagctgggctagagtggactggacagagctgggctagagtggactggactgggctgggctgggctgggctgggctgggctgggctgggctgggctgggctgagctgggctgggctgggctgggctggactgggctgggctggactgggctggactgggctggactgggctgggctgggctgggctgggctgggctgggctgggctgggctgggctgggctgggctgggctgggctcagcaggcctaagtaggcctagctgggtttagctaggtttggctaggtaaggctgagctagattggactggactgaaccaggtggggtatattcagctgacattgtttggtctggtctggactgaactggactgagccgggctagcctaagctagatggggggtatactcagctgagatgggctggtctggctagattgaactggactggactaggctgagccaggctgacctgagatgtcctgatctgggctgaactgggcagggctggtctcagctggactacactgagttaacctgggctgaaccagactgggctaaactaggttgtactggctggattagacttggctaaactgggcttggctaaactgagtcaggatggtctaggttgatttttagttgggctaaactaagctgaactacactgaactaggcaagactgggctggaaaggtctgagttaaattaggagggacttggctgggctgggctgggctgggccaggctgggctgagctgggccaggctgggctgagctgggctgagctgggctgagctggattgagccgggctgaactggactgagctgggatgagctggactgagctggactgggttgagctgaacaaaactaaactggaatgggctaaattggcctaaaattggctaggctaagctaagtaaggctgccctgagctgagaaggactggattggcctggactgagtttggatgagcatcattggactatgctaagctaacttgggtgaagtgggctaagcaggactaatctggcctgatctgagctagaccaagctaggccaagctcagctaagtttagcttagctgaattaggctgggctggactgtattgagctacactaaatttaacaggctgagctgagctgagctgagctgagctgagctgagctgagctgagctaagctgagctggttttgtctaaggtggattgacctgggctggactgaactcaattggactacactgaacttatctggacctcactgagctgtgctgcactgggccaaccctggatcactctagatctagcttagctggactgggctgagctagattgggtggactgatctaggctgaactagactattcttgcctgaggaaggctgggctatgctgagttgaactaaactgaactcagctaaggaaggctaagctagactgagctgagctacgttgggttgggctaaactgggctgagctatctcgggtagactaggctgagctagactaaattgggctgagctggagttggttggactggactgggttgggctaagctgagctgatttggtgtaatctgggatcaggtggcttgagctggactggactgtctgagctaaactgggttgagtggagctgagtgggtctgagtgaggctaggctggaatgagctaggctaaactgggctgaactggtttaggttgaatttagctgagatgagctgggctagacttctataagatggctgaactctgctagggtgaactgagctgtgctgagctgaacttggattaactataattagttgagctgggctgaactaggctgagtttagctggaataagagtcaactgggcccaactgagctaggctaagctaggctgaactgggatgagctagaattactgttctagtctgatctggactaaggtagactgggctggggttgagctctgttgggctaagcaaagttgagctatgagatgaactaggctgaattgggtacttctagatcattccaggctgttctgggttgacctgaactgggtgggattgagctaagtggggtaggctatgctgagctctgccaggctgcatgagtttattgatctgaactgggacaggctggaatggactggcctgagctacaccaactgggctaagctgggataggtcaggctaggaggagtcaagctggactaggccaaactattataggtcttttggtctagttgaactttctggtgcttaactgaactgtgtttaagatcgattgctcaaaccagagggaggagaagcccttggccctgccaaggctggaccccacacacacaccagtgtaggggaatgtcaggacagagaggtggaaaggggtgggtggttgggtgggggaaaagtgataacatttgaaatgtaagtttaaaaaaaatccaaaaaataaattaatttaaaaaaaaatagattgctcgaaattttttatggatgtttttaactgttctccaagaagattgtcctgatatagtagccagactatatcagggtaggtagagacaatcaggtttatcagaaatatcctatgctttctgggggcctggcacagagctgaactgggccccaggctcaggagaatgtcacgggcatgcgggcactccagaataatttaggcagccatcaaggtggcttctgaagtggttgtattctctaactgtgtgctgtctaggatctgcagaggtcactaggaggcagaacactttgcaggttagcctgtggtaaagccaagagccccatgaatctgaaaggctgagaccaatagccctaggaaacaagggtctcacagttctgtcattaatgtgtcccaaaacagatttaatgtgtctcgccaaggaactggtgctcctgggaaagctctgaatccccaggtcccaaaagtggggacggaagatacaaaagtaattcactggatctctgggttcccaagccctttggggtacctgtgtcttggatttaaagtatagcctggtccctctggcaatatcatacagcctaccttaaagctactccattcaccctgagaacctaatggcttccagtctgccacccagttctcctgcttcatttatgggcatatcagagataataccactgtcaccctgcttaaaggacagacaggaaataactaacacacacatccccaaaagttctcagtcaagaaagagagcaaagttgcctcttcctccaaagctcatacccagccctcctggaagcccctgtgctaagccagctaggggcagtgagcaaagcttggcagagcatcaataatcaggggcctccctgggtttgtgcttgggtttagagaatgaagacaagacccagaaggagactgtctcctagactggaagagaatccccagaaccctgctcctgtcacagctgccctaatcagtcccctatgctgcaggcatgcagtgatctaaacaaatctaacctaggtccttcctgtcccacagtttctgtcaaggccccttcactctatcccttgaagccctgtagcagcgaaaacacggcttcggtgacattgggctgcctggtaaaggactacttccctgatccggtgactgtgacctggtattcagactccctgaacacgagcaccatgaacttcccgtctatcggttctgatcttaagaccaccaccagccaaatgaccagctggggcaagtcagccaagaacttcacttgccacgtgacacatgccccatccacattcgtcagtgacttgactatccggggtaagcagggttgagctggttacagttaccacaagagggaacatggtcagagcagaaaggaccgctcatatatacctataacagggggccaggggacccaacatactcaggggcctggtttgaggcttgaggggacataaggttagggagatactcacagctcactgcctctgccctagctcgacctgtcaacatcaccaagcccactgtagatctactccattcatcctgcgaccccaacgcattccactccaccatccagctgtactgctttgtttacggccacatccaaaatgatgtctctatccactggctaatggacgatcggaagatatatgaaacacatgcacaaaatgtcctaatcaaggaggaaggcaaactagcctctacctacagtagactcaacatcacccagcagcaatggatgtctgaaagcaccttcacctgcaaggtcacctcccaaggcgagaactattgggcccacactcggagatgctcaggtaggcccacactcgcctgatgctgagacctcagagttctgaagggaaggcaggctcttacgcagcccttcctctcttacagatgatgagccccggggtgtgattacctacctgatcccacccagtcccctcgacctgtatgaaaatgggactcccaaacttacctgtctggttttggacctggaaagtgaggagaatatcaccgtgacgtgggtccgagagcgtaagaagtctataggttcggcatcccagaggagtaccaagcaccataatgccacaaccagtatcacctccatcttgccagtggatgccaaggactggatcgaaggtgaaggctaccagtgcagagtggaccaccctcactttcccaagcccattgtgcgttccatcaccaaggccccaggtgagcacaggagatggagagtgggccggcccttctctgtgttcagatggcacggttaactggttaactcgtgtctgcccacaggcaagcgctcagccccagaggtatatgtgttcctgccaccggaggaggaggagaaggacaaacgaacactcacctgcttgatccagaatttcttccccgaggatatctctgtgcagtggctgcaggatagcaagctgatccccaaaagccaacatagtaccacgacacctctgaaatacaatggctccaaccaacgcttcttcatctttagccgcctggaggtcaccaaggcactctggacacagacaaaacagttcacctgccgagtgatccatgaggcacttcgggaacccaggaagctggagagaacaatatccaagagccttggtaacacttccctccgtccctcccaggcctccatgtagctgtgatggggaaggtgaatggcagacatctgcccactgttgtaacactgggaagccaccccaataaacactcagtgcctgattagagccctgggtgcccttcttcggggaaggtgggttgtgggcagaagtatcttggcctgaaagaagggaaaccccaagagagggacaggagtgaagcatggctcacccatctgtctatgtgttgggtatttgacaaataggacatcacagggcttcagcatagataaccctggtccttcctgcccttcactgtatcatgcacctgaaagggatccaaagagccagagaggtggtctctagagatgtaggtaaaatgaaccaacctgagaggcctcggcacccacccctcagtcttgcaagctcctgctcccaggtattcctggatgctggaactccttaaggtagagaaacagccaaagtcaacatctggaaaggcagaagtcagcatggccctgctccttccctctgtactcagcagccattgaggctgagcctacggccctgacctcctgtgtgccatgtgatcataccagacccggatcagaacctggtgctcctcatctttcaacccaaagtcatcccaaggcccagaatgggaagccagcttcacacagttgggttctcccatctatgccatgttctcacacacacacacacacacacacacacacacagagccacaaacactcaggccaccaagtcttaaagagactccaccaacagcacacacttgcagccacctgacacaacaacacacctcacccatgttcacatgtggcctgcgctaggcttcagtctgtttccagtcctttaccttttacacttgagtccaaaataaaaacagaagacttacgccctgagggagagaccagtgtcttcttcctgtggcctcagctcccagaacactcttccctaccttctacaacactaagacagtaagatacacccacacgaacataaatacatacacacacacacacacacacacacacacacacacacacacaccccaagtaggcttcatcatgctctttggtttagcaatagcccaaagcaagctatgcatccatctcaggcccagagggatgaggagaccagaatcaagacatacccacgcccatcccacgcccaaccaccaaccaccagcacatacggttcacacacctgagaccagtggctcccatcacacacacacacacacacacacacacacacacacacacacacacacacaagcccgtacacatccaccatatccagagacaagtgtctgagtctgagatacctctgaggatcaccaatggcagagtcggccagcacctcagcctccaggccaatccttatactttggcccactgcaggccatgagagatggaggaggtggaggcctgagctgtggaaaaccagagacaggaagatggtctgtatggagagagtagtaaaccagattatagggagactgaggcaggagtagagctcctacaaggccagtagtctaccttagagtcctataagtctgggctgggagtccatgtgtcctgacttgctcctcagatatcacaaccaagattcctggagccagagtgtgcatgcaggccttagaaatggagcttagagcccttcctggagggccctgggcactctgaacaaaaggcaattctgtaggctgtatagaggcatcctgtcagatacacacacacatgcacacacatacacacacagagacacagacacacacacatgcccacacacatgcatacacacatgcacacacatacacacacagagacacagacacacacacatgcccacacacatgcatacacacatgcatgcacacacacacacatacacacacacacacacacacacacacacacacacacacacacacaccccgcaggtagccttcatcatgctgtctagcgatagcccttttgagggtgggagatactgggtcatggtgggcactggagtagaaagagggaatgagcagtcagggtcaggggaaaaggacatctgcctccagggctgaacagagacttggagcagtcccagagcaagtgggatggggagctctgccactccagtttcaccaggactgcctgagaccagtgagggatccaccctgccacactgtcacttggagtctggggacgctaactggctggtccccccatcccagagctagacatccaggacctatgtaccgaagaggtggagggcgaggagctggaagagctgtggaccagcacttatatcttcatcagcctgttcctgctcagtgtgagctatggggccactgtcactgttctcaaggtgggatcctgcacctcggtgggtgggtcagggaggtctaggccaagctgcagcgccatcctcacatacacctttcccccaggtgaagtgggtcttctccacactgatgcacgatacaccccagaccttccaagactatgccaacatcctccagaccagggcatagatgcgatgccagcacccgtgcaggcctgcagccatgtgtgtctgagcctcctgaggtgcctgtttgccttggatggtaggtgggagcagagacccctaaaggcaccagagttggtgagatgtcaacatgtagaaggtgcggcttggggcagcaatgtgggctgtcccgcatggatactttgagacaggactttgaagagcctcaatttgacctatcaaatgctggtcacccaggtctttcagcatcagggtcactccatattgactgaataaccacaaaagcacaagaacccagagcctagagtccccactaggccccacctagagcacagagtcaaagctgggacactcagaatcaacccaaagtccagacccttgctcctcagaaggaatcctgccccactgcttccagacagacctctggcctaggcagatcgtcctactgccagataaggagcctcccacagggcagcagcagactcaagctctgaggccccatcaaccccagccccagcctggcagtcctactttgtctctggtctctttagtaaagttcttttccataactcctgagagtgctttgagaaggtatttaaggctaccattatggtgatgacaggtcccaagaacatggacaaggaccagatggtaagagcctggggattaaacatccacctctatgccatcctcctcaaaccacagagttctgccccagtctccatccggtccatcattcctgctgaccagactcacctcccaggggaattgaggtggaatcagggctgggcccccgggaacctggctgcaggtcactcttcaagaccacaatctgcccacccagtaagtgcagactgacaggccagtcccctgacccaagctgggacactagagggactaggtaacagcacgcaagtgtacaagaaccatccaaaatgggttgtgccatcctcaagacatgatctcacatgacaaaagacaggcttctctcatatataatgattgctcagggactaagaagaaagacctcttcatgggacggaaaaaccagcagtcactgtttttttcctgaagaaaatgcttcaatggtgagaacacttctagaaagaaggatgttagggtgagtgtggccctgctgggccctgggtaaagaaaggcatgagaactacttagaccattttgagggtcagttggccaaacactcttgtcatcacaagtgacagtctcacaaagaggtccacactggggtgtcaagctcagcaccaggggactttgggggaactaagatagggataaaccagccgggatcaggccatagtccacaggcatctgagccctctgctgctgagtccggcttctacgggccttggagtagggcccagatggcaaagacacagaaagctacccctcctgggtgcagaagacccaggactgggagaatgactgttctgatgagaaaagaggctctgtttaggatgtgtcccaagccattagtgtggccagcttactaatgtgcattcatgctgcaaaccattgctcacaatcaaatgtataccacgcacacagtcacgtagtttgcgcagacccactcatgtggcacatgcctgtgggcacatgggaccacacatacacgtgatgctttaaaacacagatctgcacggtcttgtacttagacacacattgtctcaggaagcccaggtgtggaccaccctgtcctcctgccacattctcctaagccatatcccctgccaagctgaggcctaggtgcctcttcctcaaccagctcctagaccaacatccctgaggcatagctcagtgtcttcttctaatcactatccctccaagccacgagaccccatagacactggacacgggcagcaagggttcagctcaaagaacacggtgtggcaggaactcctaccaaatcccaactagaaggaaggaaagtcccacagagagctagactcactctagacaacccagacagtgaccctggcttctacataccatgaatgaatgaccttctgagactaagaggtcgctttcttctctattcctacattatcagtccaccatggagggctacatggaaaaccccaaaagacataatcacattttggaacccataaatgtagcctcttgggaatagttcttcatcaatgtgaccaaggtaactatctcaagacgaggtcatcaaggactagctagtggactttaacctggtgacaagagtcataagagacagaagcaggacctagggggtaaacagggcctgcattctccaaaatcaaagtgtcaaaacagaaatatggcagcaaaacagaagtaccgtgcccaacactggtcaagaccaatgggggaggctcatgaggggttgcctaacaagagcaggcacaagtgcttagataaaaccacaacctacactcggccaccgtaaccctacatagaaaatgtacctatgggacgtcagctcaacgtcagtcccacctcgttgctgtgcgcagacagctgcagcctgaataacctgtccaagtgtgcatgtcacatccttgatgacacactgtaaccagtgatgccatgttagcacgatgtcctgtgagggtgtcttctgactcgggatggcaaaccctaagaccaaaaggaggtgcttggttcacgagagcggcctcgtggctggacacatggcgttaaatgagcctctgtggactaggaagcagctttaaccagaaagactataccagcaccctgcttcacgtttccacctttgagcctctactgactaagccactggcagccactcagcctgtggtattctctaacggcaacagaaatgactaagacaggcaaccacaatgtcccccactgctgatggctccagggcattcttggcctgatgacaggacctccagagcctccttgagacaggcagatctctggagggcaggaccaagctttctcctctctacctccccaacatctttgactagcttcacagataaaaggctagggggacatcagtttattccacactttctaagtctgatgcaggagcccttcctctgcgaagtatctatccaagaacccagaaaaggctaacttccccaactcaacacttagcaccactgacacacctgaccatacccactgatttacaacctttctcccagacagggccattcctgggcaaagactgtggtgtgagggcccagagtcctattgttgtataaatgaggcacagtggcagaggcaagctacaaagagtgacattgtggagagaggacactggggacagtcggatgtgtagaggatcatatgaagggtggagccctaccctgacaatctacaaagagtgacattgtggagagaggacactggggacagtcggatgtgtagaggatcatatgaagggtggagccctaccctgacaatcttcaagaggctccataggtcaaaggcccatcctgagaaagctgtgataggaaattgactcagggcagatgggatccaaatgagggtagcacctaactgtgacctacagacctccatgttggtcctcaagttggggcacccactttctcatggacgtagccatggaggtagccacagctcgtgacaagccattccagacacttgcctcaccccgttgtcaaccctgtgacctcaaagctcttctctgaggcccccctcagcttagggacccctctggagtagccctgttactttggctccttgacaacaagctctcaggtctcccttctacccctaattgtcctctccctctccatctctgccttggagtctctgagaaactagatgttcatttcattccctcctgcatctcctgcccaacctacccctgtggccatgcatgtggagtcctggccccatccaggcccgtgtggtcagacacacctgtctccaccacagccagaccacaggccagacatgacgtggaggtaagcggccacaatgtggaggtggaacaggaagtgggtgagggaccccatccaggggccagacacacagtcgtgcagccccctcaccgctcagtctgacccatccacaggcaaccacacacagagaaaaccagtttccagccaaggcttcacccagtcctaagctctctccggtagggcagacggcctttagccatgagaatggaccttcagggtgggaccacctggccatgggaggcctggctgttcccctatgaatgacactcaacaaccttgagcaggtgggtcccggtaccatctggactgctctgctccttggtgcactggggaatctcaaccaggccagacctgagaacataaggcagagaagcattagcaaggagaaggtgattcggagagcaagaaccagaggaatacaggacatgaacacaggcacgaggcggggtcatggtctgagctgcagagaagagagaaaaatggatgaaactcagcttcctggaaagcagcaacaagagactcccaggctagactgaggcaaggataaggaggcatcaacaaagaatgggggtgactcgggctgccatggctcagctgagctggatttagccaggctgagctgaactaagcttagctgaggtgaatgagactgagctgagctgagctgggacaaggtaggccaagttgggctgactgagctagtctagactggtctgggctagtctgatctggactggtctgagctgaactgagctaagttgagctgggataaactgggctgaggtgggataagatggcctgacttgggtaactaagccagtctagaattggataaactgaactagactggtccaaactggactagactgagctggactgagttagaatgaggtggactgggctaaactgggctgagctaggttaagctagggtggactagaatgctgatttaagatggcctggggtgggaacgctagctaagccagaccaagctgggctaggctgggttaagttgagttgagctacagtaaactagcctgggctgtgctgaccttactacaccaggctgggtttggttggcatgaatggagctgatttgagctgggctagaccaggttagtatgagctatgctgtcctggtctaagtagactgggtgaggctgagaaaattcgagatggaaactggactgagatggaaaaagataggcttagtgttggcttactgaaccagtctagaatgagctgaactggacttggaatggcctgaactgggcttagcttatctagcctgggcttggctaggctggcctaacctaggctgagttgatctgaactggtgtaggctgggataggcttgctgaaatggactaggtcaagctgggctggagtggggttagctaaaataggtggactaggctgagatgagttaggatgacctgagctatatttaggggatggatgggatgggatgggctatcccaagctaagctgggctagaatgggctagtgtaagctaaactggctgggttggaatgtgctgggctgtgctaagctagaataaactagagtggactggccaaaatcggctgggacggtctgtactgaaccaggctgggctgggctaactgagctagaccggtctgaggtgagctaatctgggatggggcggactgagctgggataggctagattaagctgggatgagctaggctaggctcactgagctaggctggaatagaccggtctaagataggctgcctgagctaaactagactgagatgaactgtaatgagctgggatgagctaagctaatctgggatgatctgggctaggctggaatggactgagccgagctggtctcagctgggctgggttgtgctgaatgggggtaaaccagactaggctacccagactaagctgggctgtgctgggccaagctgggctgagctagggtgggttgggctcgatggctgggctaatccaagctaggctgagctgagctggactgagctgggctggacggagctaggatgggattgactgagctgagctggactgaaatgggctgagctgagctaggctgagattcgctgagctgggctgagctggactgagctggactgagctggactgagctggactgagctgggctgagctgagctaggctgagattcgctgagctgggctgagctgggctgagctgggctgagctgggctgagctggactgaaatgggctgagcagacctggacaatgcaaggctgcactgaactgtccggctaggctatactgggatgagctgagctgggctggtctcagctaggcttggctgtgctgcatggaggtaaaccagactaggctacccaagctaaactgggctggaccaggctgggctggactgagctgtgctgagctggactgagctgggctgggctgggctgagctgagccaggcttggtttggctgagctgagctgagctgagctggactgagctagactgagctgggctgagctgagctaggctggactgagctggactgagctgggctgagctgagctaggctgggtttggctgagctgagctgagctggactgagctgggtgagctaaggtagactggaattggctgagctaagctgagctggactaaactggactaagctggactgagctgggctgagctgagctaggttaggattggctgagctgagctggactgagctgggctgagctggactgagctggactgaaatgggctgagaagccctggacaaagcaaggctgcactgaactgtctggctaggctatactgggatgagctgagctgggctgggctaagttgacttgggctaggataaactaaactgggatgagccggggtgagctgcatgaggtaggctggaatggctgagctagactaggccaggctgagctggaatgagccgagttgagctgagctgagctgagataaacttagtaaggctagaatgaattgagctgagctaggctgggccgacctaaagttgctctgaggtaggttagacatggttgtctgagctgggctgagttaggctagctataccgtctgggctgacctaatatgcccatattagttgtaatgacgtgacctaggttgaaacgggcttgctgatctgggctggactgggccaaactggagttagtctagcctgggctgacttagtgtagcctgggcagagttagactggaatgggctacactgagctgaactaggatgggatgggaagggataggctgaactgactgagctgggttcagttggccttgctgggctgagctgggctggatagtctagctgggctggccagaatgaggcagagctaggctggaattaggctaaacttggtttggctggttaagatgagctaacataaattaggctggctgaactacactggactgtaagctagcctgggtgagttcgcatggctggacgtcttcacagctctagtctgagttttactggtttgttctcctcagtgctgaggtaatagaaagactttggagtaaatgtgaaccaactcttgtttcatgggtccagactgtggcctcagtttgtcttatatgaacggagccacgccactcagtgtccaattctcatgccctcttctccttccctgattacctggtggaaactcacatgtacctgtagatagtgcctacatggacagaaccactgctcagatttagtcctctggccttttggtccactgcttgctgggtggatgggcaggtggctggagtggtgggtctgaagccaggacaaggcaagtataaagtaaaaacacaacaaaatggcccccaccccccagtgtaacctccaagccagctgttccccaaccattcctgccctgtgctggctgaggttggccgtccctgctcaggcccaccagttctggacctcctaacctgggactgagaacacggctctacccactgcccaagcaggagtggggctcagaaatctggggcgctagactgctcaggagcatagccatgtttacaaagacactcacagtgcgtacaagccctgctggaggcatctagccagatccttgaaaaagacaacctgcaggtcacgttcaaaatctatgcagccagtcggtcagctccaactgcgggtacatgatgcaacccctatgtgatactgggcctaggttctccggtataaagaagaaaaaggcatggtcctttctccagagattgtctcaagatgggcagtgtgaggactactatctcactcatgttttatgttccagagtccgcgaaagatcccaccatctacccactgagacccccaccatctccgtcaagcgacccagtgacaatcggctgcctaattcagaattacttcccatccggaactatgaatgtgacctggggcaagagtggaaaggatataagcgtcataaacttcccacctgccccagcctctgggccatacaccatgtgcagccagttgacattgccagctgcagagtgcccaaaaggaacatctgtgaaatactatgttcaatataacacaagccccgtcagagaattgagtgtggaatgccctggtaaagaaggttgggggggtctggggtgggctaagtcctaccttaacctggtatctggacccatatacccctctgaagcacacatcccactcagaaacctcccatgggggatggggggagggggtgtgaacaggcagagggagcagaggcctcagaacatccagaaaaggggacagcaaaggagaaaaggagactattctgatttgctaaaacttctatgttacaggtccaaaaccctccttagtctgccgccctcgcctgtcactgcaacggccagcccttgaggacctgctcctgggttcagaggccagcctcacatgtactctgagaggcctgaaagagcctacgggagccgtcttcacctggcagcccaccactgggaaggatgcagtgcagaaggaagctgtgcaggactcctgtggctgctacactgtgtccagcgtcctgcctggctgtgccgagcgctggaacaatggagagaccttcacatgcacagctacccaccctgaatttgagacccccttaaccggcgaaattgccaaagtcacaggtgggcccagatgcatacctgggacattgtatgatgttccctgcttgcgtacctgctttcttcctctaatacagatgctcagctgctcaggcccttgtgtcacagagggaaactggagctatccaaagaactgcccagaagggaagggcagagaggtctctgctctccttgtctgagccataactcttctttctaccttccagaaaacaccttcccaccccaggtccacctgctaccgccgccgtcggaggagctggccctgaatgagctcgtgtccctgacatgcctggtgcgaggattcaaccctaaagatgtgctggtgcgttggctacaagggaatgaggagctgccctctgaaagctacctagtgtttgagcccctgagggagccaggcgaaggagccatcacctacctggtgacaagcgtgctgcgtgtgtcagctgaaacctggaagcagggtgcccagtactcctgcatggtgggccacgaggccttgcccatgagcttcacccagaagaccatcgaccgtctgtcgggtaaacccaccaacgtcaacgtgtctgtgatcatgtcagagggagatggcatttgctactgagccaccttgcctgcccctactccttaaataaactctgtgctcatccaaagtatccctgcacttccatccagtgcctgtccatcatccttagggtctacaaaacactgggaggggtcagggcccagggaaggaggaacccccaccacctgagcttgtaaggcctcagagactctgaaggacctacatgcctagagtatatgtgtatgcatgtatacgtattagtgagtgcctttgcgtgtgtacctgtgtgtaacaagagaggagtgagtttgtgcgtgcctacgggtttatataggtatgtatatgggcataagtgcatacgcctttaagtgtgagcatatctgtgtccccgtgagcacatgtgtgtctgtgtatgcctatgagtgtgcacgtatctgtgtatgctcatgttggtggaaacatgtgtgcctatagtgtgtgtacctgccaggtggatgtgcaatgaaagggaggtgagaatgggggtgaagtccgagatgagcagattcagccaagacaggcaaacctcaggggagagtcccaagagcagtgggttgctgcagaggtactctgaatggtacttctgaatggtggtgtggctgtctgagtataagattacagcttttgtcccaaacaagaaagggatagatggagcaagagagtagcaagaccaaggctggtactgcctgggagtcacaataggaacggtagaggagtgaggagatgaatccaaggggcactgggaagaagatgccacccaccctcagtgggccagccctgaatggagacgtgcatagccactcagggtgaccactgactcatgagaaagagacataacatggcacagacagccctcagcagcaccctgctctgcatatatgcacatgggcatacaccctggtctgcatacaggtacatgggcatacacgcacatacatttgcacactcacacagacccgaaccctggaggaggacgaagttcacagcccacacgcagcttctggaaagcaatgggagtcccctcccaagcccaaccatgacaactcatggacaagtctataagctcctccaggtggcccctttctaacctaagtctcccttcccatcctgagcccaagtataacaaaccagaaacagggtatgtggcaagctgggaaaagacaggagcaggccatagagaccactctcacacaggccttggcctcctccatgggcacccctagaacacaaagttctacaaccaggtacacttggcacccagatgcccacaagagggcagtggggcccctgctcctgtctcacgggccttcagaacctctccaggggcctggtttctagcaacttccctctgctgtcagagcaaggcccatgcacaccctggataccctccagcttgaaagtccacttccccgaggatagcaaaagcgacaggccagctttggaaacctgacccagaaaagcacgatagccacccatggaacccaaggcctggtccaaaacagaattctagtaaggaggagccaataggtgaaagactgaacacacacagggagagaagacagaggagcacgatagtcgagagaggggggctggtgggtgaggcgatgagtgagtgactggaacaaggttgggtggatatgcagatgaatgatgggaatggtggatggactgatggatggctgcagtgacagaaatatgagtgactgagtatcggcacacagtccctacctccacttaaaatcaaagttctatgcgcggagactctgagggcagtggggttgtctctaccgggagactttagtgttggttaacccccccccaagttctttataatgcaacagaatcctctgaccacatgtccaccccttggtattccaacctcggcccagaaatcaccttggcctgtatctgtttgagagtgtccgatcttaccgaaccctagtacccaggccaagttcaacctaagaactggggcttttgtgaggtgttgctaaatgtctagagaggtctgagacaagtggccttgggctcaaactcttctcagagcctcaaagacagaaacaactctcttaccatgatagttctctaattaagatcccctgagggaaagagagagagtcaggtcttggggggcatctcaagaacttcaaggattccagccccttacctgggaccctgccttctcattatcccagaacaagtcccttctcagagataaggaacccctgccaccaccgtccccaaagcccaagggggcatagaaacagaggccttaagcctgagcccccatccccatgggtttggatctagaaggtcatctatgtcttacagaatgccaagagccaccttcctacgtgatactggaccagtcacaagacatcctggaggaagagaccccgggtgccagtctgtggcccaccgctgtgaccttcctcaccctcttcctactgagcttgttctacagcacagcactcaccgtcacaactgtacgaggcccatttggcagcaaagaggtcccccagtactgaccaggagccagccacaggtggctgtcatggagacggtggggtacagggtgggggcaggggccttgaggatttactcagcccctccacatgtggccttgcaacccttcacagacatcaaggaagtggaaggaagtagaaggaaattatggcagcacttcctgggtttaacccagtcttccagaagccaggctgagacctcagcaaaagcaaagacataacccaactccaggatcctcccctctggctgaccacttgtgtctttgcacggatgaagcttggagaaagtcctctatgtttcagagactgatgtgacagcttcccacccgactcccatactttgctgagcaataaactggtgcaaaagcacagtttcttactctcaaaaacaaaagttaacaaaggattgggtgagggggtcagagatagtgtggtggtgccatgctaaactgttgcttacggtatagaatgtggcagcattgggcagggcagacacagggtgaccactgtctagtatccgagacaaccgtgtgtagctgtagccaagatgaacactgactgacttcaacaagtatttgtggcctcttcagacccaataccaggccattagcttgatctctggacctgacttctaaacatttggcctctgtgaacacccttgccaaacactggtcctggttgtgaaccttggtcctgaatactgagccttatcttggtaactgaaccataatcctgatccctgacctcagtcacgatcatgaaaccctggtcctggccactcgttccaataactggtccctagtcctgagccctgagtcctggtccaggtcactgaatcctggtcatgatcaatgggtttggtcctcattcctgagcctagtcttgatcactgatcactggttctgatcattaacaactaacctgatcactagtccccattcctaatcactgggccgcgatactgatcactgaaccctgtttctaaacaatgtgtagtgaaatgtatggtaaaacctttgcatctggctttgagtgaaatgtttcggcagacctttgctatgttttgggttagtcaggaaaggctgagaaatggttttgaggctgtttgaaccttgaagaaatgttgtctccctggacaatctgcacttggtactacattaaggtttgcagttgcacacaccttggtcctaaacactcctggcagacttagaactcttacgtttgattatggctagccatagttgaaaagggctgagagttgtatgggtggtctgctctctctcgcagcaagggcaagatgactttggtagttgaaaactttcccagccccaactaactctgtataatgtttgaataaagtaacggcagtaggctagttgtggttaatttttattccaagaagaatgaacccctctgctccttcagaaaaggaaggcttagcattttggtgagcttctctctactgaggcacctatgaccaactcagtgttctttgattcctgtcaccacatccagtcttgatcactaagtgccagtcctcatcactaaaccctggtctccaccagtctgcttgggttctgataatcagactcacattctgataactgggccctgattctggtcactagctctttgccctggtcatggacatttgaccctagtccacggcactgagttctgggcatggaccctgggccctagtcctaggtactgggttctggttctaacaactaggtcctgtactgatcaatgggccctgacctagacattgggccctggtcctcaacatcaacttctaagcctgaactctagccccaaattctgcttatcaacactggtcctggaccttggtcctcatcacacatccattctctgagacccaaggaatcagtggtattttgcaagaagtccctttgatattccaagcctcattctcattaggaagatctcttcaggggattcctgcagaaggttccagaatccccaccacactgttcacatactgggctgcaactgggacagtgaccccttttgctcatggaaacaaagcaggcccaggccctgtgagctggagcctctggcctggggtctacagatgtggggtcagcattgtggagaaggtttgcagggcaggtgtgggggtagggcagggatggtcacattagcatcttgtttttctttcttctgaagtctctgttttctatcacctgctgaaacattcaaagtagctccaagctgaggccagctgagtcatcctgagcctatctcagcccaggtgcctcaaaacagagctactgttctgagaatcacaccaccctggaccaggccaggtgggtctggggctggatgaggggtcagagccaggggagccctgacagggactgagaaggccccaacccccatcactcaaggttctccacaaccatccacagtcatgccttagtgaggccatgttctgtcccaatgagaacaagtccaattaagattaagtctggtcttcccagggtcattcagtgtcaaggagtgtcaaccaaggccagccaaggccagcctgaggtcagccagcatcacccaaggacacacaactattctagtagacaactagaatagtcagctcaacagggccctggtgatgcaaaatggagagtgtattcctgccagacagggctccacagataggctccctcactgcatatgacctccctgaatgtttcccacactgcagttggttctagactacttcttgataagcatgcagaaagataacaggataagaaattttatgcagagaacagaagtatctacggaatagaatagaagatagatagtagaagtctgctacaggccccagtggagtctctttgtagagtcaagagatcaaacctaaactgagtctcaggattgagtccagtacagaagcaaccttcaggatgctaaagaccatacaggcaatggacagaatggagtccagacagaccaatgagtggacagtccaatctcacataatgaaccatgtcaagagcagatagtgagccaaagaaggctctgggacactcggagattctcggcctctggatctcctgatgtatataccaggtgatcaagtgacagtctagtggagccattgccatcacagtgtcaggtgtcctccccttcatgggttccggtgaggatgtggcacctccctttagttggacgtgtacaataaattctcaggcctggtatgatttttaatgatccatgtgtttctatagtcttaattatctttaataaaattatagggtgacaccaaatttagggataagttatttatcaggctgtgcctttggaaggtgacgttatttacatagccaccaaggtgcccagtcatcggcccatcttccaaacggagtcaagggccatttgaaacagtgaaatccctcagggcaagggacacaacatggaggaatttaaaacagagtacagcttgatcttaacacacacacacacacaaacgtaagagatggaaaaggggatcaagggacacagaagtacagagaaaacaagacagtaagggatgtagagatgagaggtaaccacagggaaaggtgagacacaaagacgagaggagaaagacacagggacagaaagacccatgcaagcaagagagacagacataaggaagaaaaggcgagaagagacagacaaaggtgcagcaatgtggcccacctggtactcacaagaaggccctggcacacactccgatgagagccatgcacctacaaacacgtagacacagctccacacagacacacacggcatctgcacaactgtctgaacctcaaacaggtctgcccactccctctcctccaggcctttgtccttaggaaggcacgctgagggtaactcagtcgggatacttctgattggggctcactgaacagcctgaggctgggtccacagttgctctcactgtctggccctgtaccccaggtcatgcttcagagggaattaactgaatgcagtaaacaccgtctgtggtcagcatgtactaagggatagaaccctatcaggatttgtccaactaaggtccaaatacagagtgaagaagacgatgggggagatcagatggcagatgggagcactctggatagagctcagggatatggtggctgaggaacattacagctgccaggcttggcctttcatctcagctctaggtcaaggggaactacccaggtctctgctttgttgctggtaactatacctaagtctaagaacctcagtaagacacagaaccagtaagacgacagcctccatcgataagaaagaaaggagaaaggcagaatggataagtctctggacagatgagagcctacacccaaaaacagttcgttcagccagttaatagggtgtagccctagcacacgagagaaaacagttccacaggtgtaagggagtaaatctgtgcgaaggggtactgcttgagctcctcatggcctggtccagaagcagaagctgggcaggggcaaaggacagggtaaggcagggagacaggggcatgaaggagcctttgggactgtgtggtgagaactaggctgtgcttttactgagcctgagtttgtggcagttgcctcatggggaaggcacccagaggtaaggcagaggaaaggagtaactagggctgagggcaccacagggtctgaggaattagaggcagctatgacccatttgtcatggtatttggacatgtacttcatggacacagatctgagaaccaggcctggctctcactaaccagcaggaggtgtcccacttgtggctgtaggtctttcagcacaccatgccatgggcctctcacactggacgatctgtctgaaaggctgatgttgggaggtgggagcccaggcctggggtctgggacactgggtgacagaggtgtccagaatgtagagtgctcagagtgtgggtggggacaagctgtagagtgtccccatgaggggacaggctgagatagggactgaagtccatctacaggcttaccacactccatgctctggatgagagcactgagctctgccaccctacaacagcaggcagagcggcctccatgctaggaaagccaggcagcagggacagagttcctggatggggcaggtggaattgtctctgctcggcatcaaactaagtggaccttcagcagtaaggtcttactgtctagtcatggtggacagccaggaacatagtcaatgaacagcctgctttgtttggattcctctggagacttcctgatcaataacttgtaggcctccatgtttcatgtgacaacttacatctctctatgtataacatgggctttctgtgtagtcctgggtatcctagaacaccctgtgtagaccaggctggcttcaaacttgggacatcctcctgtctctgccttctaataaatgctgggattaaaggctgtgccaccacacacaatctaacccatttcttctgggaataacactgttcacccagccatacactgagttaaaattccttaataaatgttagttcatttacaaaatagtggatttccataaggcttcttcatggatcctaatccaacttttaccttctcttttccccaatcctccaatccccctattcccacttaaatctgaaatccccctccctccattttcaagctgcctgtgttctatgtcccctcatattgtttttttcttgtgtggaggtttgcagatttgaatgcaggaacccttcactggggctaagcctcctgccacccagcacttcccatccccacacctcctcacgcttgatttagcccatgtcccctcatgtgtatgggtgtttctcttcagtctgaggcattactccccgtgtcctctggagagctgcctactgtcacagatacctttcttctgtttctgctagggaaagcttttatttccccttgaattttaatcattgtctgggtgtaataccctgggttgagagctgtgttctttcagaacttggactacgtctatccaggcatctggctttaaagtttctactgtggggctgcagagatggctcagtggttaaccacacatttcttcttgcagaggacttgggcttgattcctagtacctccgtggcagctaagaaccatctgtgactccaactgcacaggattcgatgcccttttctggaggtcatctggagtagtcagctcaacagggccccgggatgcagcatggagagtccatgctgacaggcagggctccacagagagagaaagacagaaacacaggccactgaaagagacagtaatggactgaggggacagagagaaacacacggacagacagacagagataacaaaacaccgacactcatagacacagagaagagaggggacagggaagttttgagagcaatgggtaggaggtgagagagacacagaggcaatacatacagagagtgactccagaagacagagtctgagaggagacactgcaagagacagagaccccaaaagggttgagagcactggatgctttcacagagaatccagattcgattcccagcaggctcatggcagctcatactgcaatcccagttccagagtgccctgaaggatccttcatgcatgtggagcacagaagcgctctctctctctctctctctctctctctctctctctctctctctctctctcagatgaaagccatgaaccagaagacagagacatgagtgaacactcctcagagacatagccacagcactcacacccagttccacacagacacatacagcacctgcctgcctgatccaaaccccaaacccattgacccactccctctcctccaggtctttgttctcagagtagcacactgagggtagctcagcctggatacttcccaaggggcctggacacacagcatgcatctctggtccacagcccccatcccttgttggccctgtaatccatgtgatgtctcaggagaagatgttgtctgagagcagggcctggtacagtgtccctggtacagtgtccctggtacagtgtccctggtacagtctctctagtaaagtctctctggtacagtttccctggtacagtcttcctggtacagtgtccctggtacagtctctctggtaaagtctctctggcacaggatgcctagtatagtctttctggtacaatctgcctggtacagtctgcctagtacagtcttcctggcacagtctatccctggtgcaggcttcaggtcaggcccaagtgtgaagagtgcagaagacagtgggcagagctgagagagcgctagtcagttttgttcagagaacagtgatggccgctccaggctactggacatcccaggtgtgcttcttacacttctcaaagctgtgggaacacaaccgaccctctactcacttcagtgtaattgcctatagcagggcatgcctctgggcatcagggagtcacacagaggcaggtaagactctagacctggggactgagaggggaaggcatgtacaagagggcctcatccttaggacacagggattcgaggcctctggatagccagtgagcaacatatgcagagtgatgaggccccaggagtctaatggacgccaggaggtcacagagctagaggcctggagggctagagtctgtgggaagggggactgcttaggttcttcccacccatgtccaggagcagaggctgggcagggccacaggacagggtaaggcagggagacaggggcatgaaggagcctttgggactgtgtggtgagaactaggctgtgcttttactgagcctgagtttgtggcagctgcctcatggggaaggcacccagaggtaaggcagaggaaaggagtaactagggctgagggcaccacagggtctgaggaattagaggcagctatgacccatttgtcatggtatttggacatgtacttcatggacacagatctgagaactaggcctggctctcactaaccagcaggaggtgtcccacttgtggctgtaggtctttcagcacaccatgccatgggcctctcacactggacgatctgtctgaaaggctgatgttgggaggtgggagcccaggcctggggtctgggacactgggtgacagaggtgtccagaatgtagagtgctcagagtgcgggtgggaacaagctgtagagtgtccccatgaggggacaggctgaggtagggactgaagtccacccaaggctcaccacactccatgctctggatgagagcactgagctctgccaccctacaacagcaggcagagcggcctccatgctaggaaagccaggcagcagggacagagttcctggatgggacaggtggaattgtctctgctctgcatcaaactaagtggaccttcagcagtaaggtcttactgtctagtcatggtggacagccaggaacatagtcaatgaacagcctgctttgtttggattcctctggagacttcctgatcaataacttgtaggcctccatgtttcatgtgacaacttacatctctctatgtataacatgggctttctgtgtagtcctgggtatcctagaacaccctgtgtagaccaggctggcttcaaacttgggacatcctcctgtctctgccttctaataaatgctgggattaaaggctgtgccaccacacacaatctaacccatttcttctggaaacaacactgttcacccagccatacactgagttaaaattccttaataaatgttagttcatttacaaaatagtggatttccataaggcttcttcatggatcctaatccaacttttaccttctcttttccccaatcctccaatccccctattcccacttaaatctgaaatccccctccctccattttcaagctgcctgtgttctatgtcccctcatattgtttttttcttgtgtggaggtttgcagatttgaatgcaggaacccttcactggggctaagcctcctgccacccagcacttcccatccccacacctcctcacgcttgatttagcccatgtcccctcatgtgtatgggtgtttctcttcagtctgaggcattactccccgtgtcctctggagagctgcctactgtcacagatacctttcttctgtttctgctaggggaagcttttatttccccttgaattttaatcattgtctggctgtaataccctgggttgagagctgtggtctttcagaacttggactttgtctatccaggcatctggccttaaagtttctactgtggggctgcagagatggctcagtggttaaccacacatttcttcttgcagaggacttgggcttgattcttagtacctccgtggcagctaagaaccatctgtaactccagctgcacaggattcgatgcccttttctggaggtcatctggagtagtcagctcagcagggccccgggatgcagcatggagagtccatgctgacaggcagggctccacagagagagaaagacagaaacacaggccactgaaagagacagtaatggactgaggggacagagagaaacacacggacagacagacagacagacagacagacagacagacagacagacagagatagataacaaaacaccgacactcatagacacagagaacagaggggacagggaagttttgagagcaatgggtaggaggtgagagagacacagaggcaatacatacagagagtgactccagaagacagagtctgagaggagacactgcaagagacagagaccccaaaagggttgagagcactggatgctttcacagagaatccagattcaattcccagcaggctcatggcagctcatactgcaatcccagttccagggtgccctgaaggatccttcatgcatgtggagcacagaagctctctctctctctctctctctctctctctctctctctacactgtccccatgaagggacacgctgacgtacggactgaagtccacccaaagctcaccacactccatgctctggatgagagcactgagctctgccaccctacaacagcaggcacagcggcctccatgctaggaaagccaggcagcacggacagagttcctggatggggcaggtggaattgtctctgctcggcatcaaactaagtggaccttcagcagtaaggtcttactgtctagtcatggtggacagccaggaacatagtcaatgaacagcctgctttgtttggattcctctggagacttcctgatcaataacttgtaagcctccatgtttcatgtgacaacttacatctctctatgtataacacgggctttctgtgtagtcctgggtatcctagaacaccctgtgtagaccaggctggcttcaaacttgggacatcctcctgtctctgccttctaatccatgctgggattaaagcctgtgccaccacacacaatctaacccatttcttctggaaacnnnnnnnnnnnnnnnnnnnnnnnnnnnnnnnnnnnnnnnnnnnnnnnnnncagtggcacacacacatacacacacacacacacacacacacacacacacacacacacatacactctaatgaaggcagtggcgcacacacacactctcagatgaaagccatgaaccagaagacagagacatgtgtgaacactcctcagagacatagccacagcactcacacccagctccacacagacacatacagcacctgcctgcctgatccaaaccccaaacccattgacccactccctctcctccaggtctttgttctcagagtagcacactgagggtagctcagcctggacacttcccaaggggcctggacacacagcatgcatctctggtccacagcccccatcccttgttggccctgtaatccatgtgatgtctcaggagaagatgttgtctgagagcagggcctggtacagtgtccctggtacagtgtccctggtacagtgtccctgggacagtgtccctggtacagtctccctggtacagtctccctggtacagtctctctagtaaagtctctctggtacagtttccctggtacagtcttcctggtacagtgtccctggtacagtctctctggtaaagtctctctggcacaggatgcctagtatagtctttctggtacaatctgcctggtacagtctgcctagtacagtctccctggtaaagtctgtccctggttcaggcttcaggtcaggcccaagtgtgaagggtgcagaagacagtgggcagagctgagagagcgctagtcagttttgttcagagaacagtgatggccgctccaggctactggacatcccaggtgtgcttcttacacttctcaaagctgtgggaacacaaccgaccctctactcacttcagtgtaattgcgtatagcagggcatgcctctggacatcaggaagtcacacagaggcaggtaagactctagacctggggactgagaggggaaggcatgtacaagagggcctcatccttaggacacagggatttgaggcctctggagagccagtgagcaacatatgcagagtgatgaggccccaggagactgatgggcaccaggaggtcacagagctagaggccgggagggctagagtctgtgggaagggggactgcttaggttcttcccacccatgtccaggagcagaggctgagcagggccacaggacagggtaaggcagggagacaggggcatgaaggagcctttgggactgtgtgatgagaactaggctgtgcttttactgagcctgagtttgtggcagctgcctcatggggaaggcacccagaggtaaggcagaggaaaggagtaactagggctgagggcaccacaggatctgaggatttagaggcagctatgacccatttgtcattgtatttggacatgtacttcatggacacagatctgagaaccaggcctggctctcactaaccggcaggaggtgtcccacttgtggctgtaggtctttcagcacaccatgccatgggcctctcacactggacgatctgtctgaaaggctgatgttgggaggtgggagcccaggcctggggtctgggacactgggtgacagaggtgtccagaatgtagagtgctcagggtgcgggtggggacaagctgtacagtgtccccatgaggggacaggctgaggtagggactgaagtccacccaaggctcaccacactccatgctctggatgagagcactgagctctgccaccctacaacagcaggcacagcggcctccatgctaggaaagccaggcagcagggacagagttcctggatggggcaggtggaattgtctctgctcggcatcaaactaagtggaccttcagcagtaaggtcttactgtctagtcatggtggacagccaggaacatagtcaatgaacagcctgctttgtttggattcctctggagacttcctgatcaataacttgtaggcctccatgtttcatgtgacaacttacatctctctatgtataacacgggctttctgtgtagtcctgggtatcctagaacaccctgtgtagaccaggctggcttcaaacttgggacatcctcctgtctctgccttctaatccatgctgggattaaagcctgtgccaccacacacaatctaacccatttcttctggaaacaacactgttcacccagccatacactgagttaaaattccttaataaatgttagttcatttacaaaatagtggatttccataaggcttcttcatggatcctaatccaacttttaccttctcttttccccaatcctccaatccccctattcccacttaaatctgaaatccccctccctccattttcaagctgcctgtgttctatgtcccctcatattgtttttttcttgtgtggaggtttgcagatttgaatgcaggaacccttcactggggctaagcctcctgccacccagcacttcccatccccacacctcctcacgcttgatttagcccatgtcccctcatgtgtatgggtgtttctcttcagtctgaggcattactccccatgtcctctggagagctgcctactgtcacagatacctttcttctgtttctgctaggggaagcttttatttccccttgaattttaatcattgtctgggtgtaataccctgggttgagagatgtggtctttcagaacttggactttgtctatccaggcatctggccttaaagtttctactgtggggctgcagagatggctcagtggttaaccacacacgttgttcttgcagaggacttgggcttgattcttagtacctccgtggcagctaagaaccatctgtaactccagctgcacaggattcgatgcccttttctggaggtcatctggagtagtcagctcagcagggccccgggatgcagcatggagagtccatgctgacaggcagggctccacagagagagaaagacagaaacacaggccactgaaagagacagtaatggactgaggggacagagagaaacacacggacagacagacagacagacagacagacagacagacagacagacagacagacagacagacagacagacagagataacaaaacaccgacactcatagacacagagaacagaggggacagggaagttttgagagcaatgggtaggaggtgagagagacacagaggcaatacatacagagagtgactccagaagacagagtctgagaggagacactgcaagagacagagaccccaaaagggttgagagcactggatgctttcacagagaatccagattcaattcccagcaggctcatggcagctcatactgcaatcccagttccagggtgccctgaaggatccttcatgcatgtggagcacagaagctcgctctctctctctctctctctctctctctctctctctctctctctctctctcagacacacacacacacacatacacacacacacatacactctcaaatgaaagccatgaaccagaagacagagacatgtgtgaacattcctcagagacatagccacaacactcacacccagttccccgcagacacacaaatcacctgcctccctgttccaaatcccaaacccattaactcactccctctccttcaggcctttgatttcagagtagcacaccgagggtagctcagcctagacacttcccatgggacctggttacatagcgtgcacagggccacctcttgttggccctataacccatgtgatgattcaggaaaagatgttgtctgagagcagggcctggtacagtccccctggtacagtccccctggtacagtctctctggtacagtctccttggtacaggcttcctgatacagtctctctggtacagtctctctggtacaatctgcctcgtacagtctccctgatacagtctgcctggtacagtctctctggtacagtctgcctggtacagtctccctggtacagtctccctgatacagtctgcctggtacagtctctctggtacagcctctctggtacagtcggcctggtacagtctccctggtacagtctccttggtacagtctccctgatacagtctgcctggtacagtctgcctggtacagtctctctagtacagtctgcctggtacagtctgcctgatacagtctgcctgatacagtctgcctggtacagtctccttggtacagtctgcctggtacagtctgcctgatacagtctgcctggtacagtctctctggtacagtctccttggtacagtctccctgatacagtctccttggtgcagtctccctgatacagtctctctggtacagtctgcctggtacagtctccctggtacagtctccttggtacagtctccctgatacagtctgcctggtacagtctccctggtacagtctccctggtacagtctgcctggcacattctatccctggtgcaggcttcaggtcaggcccaagtgtgaagggtgcagaagacagtgggcagagctgagagagcgctagtcagttttgttcagagaacagtgatggctgctccaggctactggacatcccaggtgtgcttcttacacttctcaaagctgtgggaacacaaccaaccctctacccaattcattgtaattgtctatagcagggcatgcctctgggcatcagggagtcacacagaggcaggtaagactctagtcctggggactgtagaaggtatgtaagtacaacagggcctcatccttggaacactggtgtctcaggcttcaatacagccagtgagaaacacatgcagagtgatgtggccccaggagactgatgggcaccaggaggtcacagagctagaggcctggagggctagggtctgtgggaagggggactgcattcactcttcctatgcttgcccaggaacaactgtctatgcagggccacaggacagggtaaggcagggagacaggggcatgaaggagcctttgggactgtatgatgagagtctaggctgtgctctgactgagcctgagtttgtgacagctgtctcatgaggaagacacccagaggccagacagaggaaaagagtaatcagggctgagcggaccacagggtctggggacgtggaggtggctggcctggctcccacaggccctcagatggagctgcacatcatcccatagcatatcactctggagggcttatcaaaatggttgtgctgtgggactgggtttcaggactgaggcctgagatactgggtagcagaacatgttcagtatacagggtgctcagagtacgggggggggggggacaagctctgcagtgttcctccatgttgggacaagcagaaagaggtcttgaagctgtttgtccatccataggcctaacccatactggccctgctcatggccctagcttgggccacatatctagtgcccactgaatcatcaccatgaagactgttggaaaaccagagcctctgatgtcttcctgccttgcttgctctccctgactctcatagctcacacaggctctgccctggtccaccactgtcctcaactgtaaaccatgccaggcacagagagcaaggaatgtggtggtctcagactgtcacacacaacaatcttgtgcctttcacatccacacgcacaagcatgctcatacccctctgtcaggggtcagtggggtcttccttgggctcactcccatttctagctgctccttggtattggtgactgcggctgctgtgtcggtggctgccagagatgcttgatcggcatgacctcagatataggaatggcctggggtcaacagagtgcacacacttagggcactggccagagttctatgtagaccaaggcctctcttcctagtgtgttatttcacaaaaccttatgcaacaacatcttctattccttttattcctctttgtctgctaatggggaattttctagaaagagtgtcccctctctgtcttcctgctgtgtagacagatcttgtaggtgtgatcacagagtggtgtttcccttcttggccattttcaggccaggaactcagggccagagacagaaagtcaggaaggtaggaaagacagggagacataataaaggtgagatggagacagagaaagacaaagggagaaaagcacaggattgcagggagagacaaggagacgcccgacggaaacagacatcagggaaaagacatgattgttcctttagtaaattgctttccggagaaaagagacagcagagagacatggataggcacacaaagatacaaggagagagacaggaaacagagaaagagagaaacagagatggagaaacaacgagggagagagaagagtagagagaaagacacggagaaaaaaaatcaagaaacagaaaagacaaaagataggaagacagagaaataggccagaaatacagacagacagagagatgcctgaagatgttctctctcacctagagaaagaaagcacaggcagagataatacagagagagagagagagagagagagagagagagagagagagagagagagagagagagagaggagagaaagaggagagacacggtgttagaggagaaagcattatgttttgatagagacagagatacagcaactgaggaacagactgagcagaaagaatcccactcagagagagacagaggctaagctgggagaggcaggggtggccagagagggagacagaggagagcctgtgggacaggtcagacaccatcttggaagacccagtgacaagccagggaggtgacaggttagtgcagtttctaccccacagtccacaggctggagccacaggcctgtgtccatgtggccacaggctagctcccagcctgccaagcctgtctgtggagggattgcggagtggggctgggctgaggcaggccaggatttttccagtggagcagccagtgactgggctgagggtcactgcccaccatccccgtgattctgggtagacccaggacctggagcacacacagccttcctgtctctcccacttccctggggtgtttggaccttgcctatctcctgtcattccctcctagggtcagattccagcagtgtcgataaatgggaaaacactgaattcaatgtcaccgttaggggtcatggaacccccagccccatccccaaagctggtcaacctggccagggtggggtgaacctgcagctgcaggtgggggaatcattgatgctatttttggctcagagaatgagaaacatgtttttctgcatggaacaaacatccatttgcatgtgccccgagggccaaccctgcacagagtgagtcactcggcaggtgtgtgtgtgtgtgtgtgtgtgtgtgtgagagagagagagagagagagagagagagagagagagacagagacagagacagagacagacagagagacagagagacagagagagagacagagagagacacacacagagacagagagacagagagagacagagacagagagagacacacacacagagacagagagacagagagagagatgttgtgagcaagccctgtttcaggtactgatatctgtgcccccgtgccccagcccatgtggaaaaactacccttaggggcccattaactcatcacagtccaggccatcatggtgagccctagctgacctaagcaggttccaccctaaacatgaaggaaaataataaaggccatctgttacccagaatcctagggatggtgggcagtgaccctcagcccactcctggccgctccactggaagaatcctggcctgcctcagcccagccccactccgcaatccctccacagacaggcttggcaggctgggagctagcctgtggccacatggacacaggcctgtggctccagcctgtggactgtggggtagaaactgcactaacctgtcacctccctggcttgtcactgggtcttccaagatggtgtctgacctgtcccacaggctctcctctgtctccctctctggccacccctgcctctcccagcttagcctctgtctctctctgagtgggattctctctgctcagtctgtcagccatagttggagagagtccatctatgtttgcctctgtctctgccaattccatcagaggtctctctactaacacttgcctctgcatgtgtctcttggtccttctcctgtcttcccatctctctatctcctcatctctctgtctttctgttactccctgtctctgtctctctgtcttttctctcactgtctttatctctctgcctgtttcatggacttttctctgtctctctgtctctgtctctctgtctctctctctgtctctctctgtctctgtctctctctgcccctatctcttggtctctatctctatcttcaactccctatctttgttcctcatactcacatttacctctttcccaagcccccagtctccaggtctgcctgtttctgtctctcccttgccatgtttccctgttttattctctctcctcctgaatgctctggcttgaaactggccaagaagggaaacaccactctgtgatcacacctacaggatctgtctacacagcaggaagacagagaggcgaccctctttcaccctacagtgtctggacttggttgattccaggttactcctatactcaagtccgggactatggtggtcaagcatctctggcagccactgggacagcagctatagccaccaacatcgagccctgttagctaccaacattagctcctcaaagaggttgggtctataggcctctggtgtgaggagatgttgacagtgagaattagttcccaaggaggacaccactgtttcctgttagatggagaactacagtgggtacgaacatgcttgaacacatgagtgtcaaatgcacaagactgttgggtgtgtcacccttcccctctctgttcatggcatgactgcacactgaacacaatggtggattgggacagagtctgtgtgagttgagaatcatgaagagtgtagacacttcaaggatagtgtagacccttctagttcgtggtgatggctcacttggcactgagtttctgaccccacagggaccatggacaagggcagtatgggctgtgcctatggatacaaaagagacttcgaagcctgtattagcctgtcccctcatggaggaacacagcacagcttgtctctacccacactctgagtactctacgtcctggacacctctgtcacccagtgtcctaggtcccatccttggctcccacatcacatctgcctttcagacagatcttccagtgtgacagacccatttcatggtgctgaacaacataaacccatttcctgagggttggtgagagccggcctggttctcagatctgtgtccatgaagtacatgaccaaataccatgacaaatgggtcatagctgcctctaattcctcagaccctatgggccctcagccctggttactcctttcctcggcctggcctctgggtgccttccccatgaggcagctgccacaaacccaggctcagtcagaacatagcctagttcctaccatacagtcccaaaggttgcttcatgcccctgtctccctgccttagcctgtctgtgctcctgcacagacaagagttcctgggcaagcataggaagagtgaatgcagtccctcttccaacagaccctagccctccaggcctctagctctgtgacctcctggtgtccattagactcctggggcctcatcactctgcatgtgttgctcttgtacatgccttcccctctcagtccccaggtctagagtcttacctgcctctgtgtgacttcctgatgtccagaggcatgccctgctatagacaattacactgaagtgagtagagggtcggttgtgttcccacagctttgagaagtgtaggaagcacacctgggatgtccagtaacctggagcggccatcactgttctctgaacaaaactgactagcattctctcatctctgcccactatcttctgcacccttcacacttgggcctgacctgaagcctgcaccagggacagactttaccaggcagactgtaccaggaagactgtaccagggagattgtaccaggcagagtgtgccaggcagactgtacaaggcacactatatcagagagactttaccatgcagactgcaccagggagactgtaccagggagactgtaccagggagactgcaccagggagactgtaccaggccctgatctcagacaacatcttttactgagacatcacatggattacagggccagcaagaggtgggggctgtggaccagaggctcatactgtgttaccaggtcccatgggaagtgtccaggctgagctaccctcagtgtgctactctgagaacaaaggcctggaggagagggagtgggtcaatgggtttggggtttggatcaggcaggcaggtgctgcgtgtgtctgtgtggaggctgggtgtgagtgctttggctatgtctctgaggagcgttcactcatgtctctgtctctggttcatggctttcatctgagagagagagagagagagaaagagagagagagagagagagagagagagagagagagagagagagcgcttctgtgctccacatgcatgaaggatccttcagggcaccctggaactgggatttcagtatgaactgccatgaacctgctgggaattgaatctggattctctgtgaaagcatccagtgctctcaacccttttggggtctctgtctcttgcagtgtctcctctcagactctgtcttctggagtcactctctgtatgtattgcctctgtgtctctctcacctcctacccattgctctcaaaacttccctgtcccctctgttctctgtgtctatgagtgtcggtgttttgttatctctgtctgtctgtctgtctgtctgtccgtgtgtttctctctgtcccctcagtccattactgtctctttcagtggcctgtgtttctgtctttctctctctgtggagccctgcctgtcagcatggactctccatgctgcatcccggggccctgctgagctgactactccagatgacctccagaaaagggcatcgaatcctgtgcagctggagttacagatggttcttagctgccacggaggtactaggaatcaagcccaagtcctctgcaagaacaacgtgtgtggttaaccactgagtcatctctgcagccccacagtagaaactttaaggtcagatgcctggatagacaaagtccaagttctgaaagaccacatctctcaacccagggtattacacccagacaatgattaaaattcaaggggaaataaaagcttcccctagcagaaacagaagaaaggtatctgtgacagtaggcagctcttcagaggacacggggagtaatgcctcagactgaagagaaacacccattcacatgaggggacaggggctaaatcaagcgtgaggaggtgtggggatggaaagtaatgggtggcaggaggcttagccccagtgaagggttcctgcattcaaatctgcaaacctccacacaagaaaaaaataatatgaggggacgtagaacacaggcagcttgaaaatggaggatgcttttagcattaaagatttacagtgtagnnnnnnnnnnnnnnnnnnnnnnnnnnnnnnnnnnnnnnnnnnnnnnnnnnnnnnnnnnnnnnnnnnnnnnnnnnnnnnnnnnnnnnnnnnnnnnnnnnnnnnnnnnnnnnnnnnnnnnnnnnnnnnnnnnnnnnnnnnnnnnnnnnnnnnnnnnnnnnnnnnnnnnnnnnnnnnnnnnnnnnnnnnnnnnnnnnnnnnnnnnnnnnnnnnnnnnnnnnnnnnnnnnnnnnnnnnnnnnnnnnnnnnnnnnnnnnnnnnnnnnnnnnnnnnnnnnnnnnnnnnnnnnnnnnnnnnnnnnnnnnnnnnnnnnnnnnnnnnnnnnnnnnnnnnnnnnnnnnnnnnnnnnnnnnnnnnnnnnnnnnnnnnnnnnnnnnnnnnnnnnnnnnnnnnnnnnnnnnnnnnnnnctcattcctctttttttggcggccgatggcggttatattccttgcgtctcccgtatccagaaataataatcattcaaaacggtgttctcctcagccagtgtatgccttttggattttgcttccagcagcaccgagtggagaggagaggagaggagaggagaggagaggagaggagagatgttcagttatccaaaactaaggatccatgaagaagccttatggaaatccactattttgtaaatgaactaacatttattaaggaattttaactcagtgtatggctgggtgaacagtgttgttcccagaagaaatgggttagattgtgtgtggtggcacaggctttactcccagcatttattagaaggcagagacaggaggatgtcccaagtttgaagccagcctggtctacacagggtgttctaggatacccaggactacacagaaagcccgtgttatacatagagagatgtaagttgtcacatgaaacatggaggcctacaagttattgatcaggaagtctccagaggaatccaaacaaagcaggctgttcattgactatgttcctggctgtccaccatgactagacagtaagaccttactgctgaaggtccacttagtttgatgccgagcagagacaattccacctgccccatccaggaactctgtccctgctgcctggctttcctagcatggaggccgctgtgcctgctgttgtagggtggcagagctcagtgctctcatccagagcatggagtgtggtgggcctgtggatggacttcagtccctatctcagcctgtcccctcatggggacactgtacagcttgtccccacccgcaccctgagcactctacattctggacacctctgtcacccagtgtcccagaccccaggcctgggctcccacctcccaacatcagcctttcagacagatcgtccagtgtgagaggcccatggcatggtgtgctgaaagacctacagccacaagtgggacacctcctgccggttagtgagagccaggcctggttctcagatctgtgtccatgaagtacatgtccaaataccatgacaaatgggtcatagctgcctctaaatcctcagatcctgtggtgccctcagccctggttactcctttcctctgccttacctctgggtgccttccccatgaggcagctgccacaaactcaggctcagtaaaagcacagcctagttctcatcacacagtcccaaaggctccttcatgcccctgtctccctgccttaccctgtcctgtggccctgcccagcctctgctcctggacatgggtgggaagaacctaagcagtcccccttcccacagactctagccctcccggcctctagctctgtgacctcctggtgcccatcagtctcctggggccacatcactctgcatatgttgctcactggctatccagaggcctcgaatccctgtgtcctaaggatgaggccctcttgtacatgccttcccctctcagtccccaggtctatagtcttacctgcctctgtgtgactccctgatgcccagaggcatgccctgctataggcaattacactgaagtgagtagagggtcggttgtgttcccacagctttgagaagtgtaagaagcacacctgggatgtccagtagcctggagcggccatcactgttctctgaacaaaactgactagcgctctctcagctctgcccactgtcttctgcactcttcatacttgggcctgacctgaagcctgcaccagggatagactgtgccaggcagactgtaccagagagactgtaccaggcagactgtatcagggagactgtaccaggcagactgtatcagggagactgtaccaggcagactgtatcagggagactgtaccaggcagactgtaccacacagactatactaggcatcttgtaccagagagactttaccaggcagactgcaccagggacactctaccagggacactgtaccagggacactgtaccagggacactgtaccaggccctgctctcagacaacatcttctcctgagacatcacatggattacagggccaacaagggatgggggctgtggaccagagatgcttgctgtgtctccaggccccttgggaagtgtccaggctgagctaccctcagtgtgctactctgagaacaaagacctggaggagagggagtgggttcatgggtttggggtttggatcaggcaggcaggtgctgtgtgtgtctgtgtggagctgggtgtgagtgctgtggctatgtctctgaggagtgttcacacatgtctctttcttctggtgcatggctttcatctgagagagagagaaagagagagagagagagagagagagagagagagagagagagtgtgttgctgccttcatttgagtgcttggtgggctccatgctgtacctctgccttccctgtgtgtctgtccttttgcctctcccttcctttggcctgtctctcttgtctgcatctgtctctcttgtctctccctctctgtgtctcttttctctcctgtctctgtgtctcttctttcctgtggtctctcctcatccccatgtctgcatcagtgtctatcagtctttaactctgtgtcctcttgttcccatttctgtccctctggatatttctgtctttctgtgtgtctgtcctcatctctcccagcgtccatgtctttgtgtccctttgtccccacacagtatcttctcaaatactctgtgtgcctggtcccctgtctctcattccttttctcactgctcccatcagtgtttctctgtgtctctgcttctgtgtctctgtgtgtctgtctcatgctatctctttctctctcattatctctgtctccctcagacttctctgtctttcttggtctctgtctccctctgtgtctctgtctttctgcatgtctaatgtctctgtgtctcccttagctcatctctgtctctctcaatattcccacaatcccctttattctttgtgtctctgtctctgtggtgtctctttctcagtctctctgtatttcgctctgtctctcagaatctctgtgtccctcatattatttttcgaagtgtctccctatctctttcagtaacactatttctgtttttctcagtctctctctctctctctctctctctctctctnnnnnnnnctctctctctcagaaagtctatggcacctcttctatgtgtgtcccactctggacctggatcaatcttccttcttggacctcagtttcatcagttgtgagacgataccttgccagaagtccagaggactgtctgtcctccatagtctagaccacctgtgatctgagagatattgggacaacggatgtgcagtgagggacctgcctttctgtggagccctgtctggctggaatacactctccattctgcatcaccagagccttgttgagctggctattctagttgtctactagaatagttgtgtgaccttgggtgatgctggctgacctcaggctggccttggctggccttggttgacactgaatgaccctgggaagaccagacttaatcttaattggacttgttctcattgggacagaacatggcctcactaaggcatgactgtggatggttgtggagaaccttgagtgatgggggttggggccttctcagtccctgtcagggctcccctggctctgacccctcatccagccccagacccacctggcctggtccagggtggtgtgattctcagaacagtagctctgttttggggcacctgggctgagataggctcaggatgactcagctggcctcagagtggagttattttgaatgtttcagcaggtgatagaaaacagagacttcagaagaaagaaaaacaagatgctaatgtgaccatccctgccctacccccacacctgccccgcaaaccttccccacaatgctgaccccacatctgtagaccccaggccagaggctccagctcacagggcctgggcctgctttgtttccattcagtgcctctgggaaaggcagatgagtaaaggggtcactctcccagttgcagcccagtgtgtgaacagtgtggtggggattctggaatcttctgcaggaatcccctgaagagatcttcctaatgagaatgaggcttggaatatcaaaggtacttcttgtaaaataccactgattccttgggcctcagagaatggatgtgtgatgaggaccaaggtccaggaccagtgttgataagcagaatttggggctagagttcaggcttagaagttgatgttgaggacctgggcccattgatcagtacagaacctagttgttagaatcagaacccagtgtctatgaccagagctcagtgatagggaccaagtcccaaggccaaatgatcaagaccaggacccagttgccaggaccaagatccaggtttcacaaccaaacctagttacgcagaccagaaaccattcgttggaatctggatctgaatcagagcccaatcacactactctaaaccagagttcagtgttgaggaccagggtacgtgatgagcccaagattcagagatcaagaggtggattcagtaattaagaccaggattcagagatcaggatcagggctcagttagcaggatcagggctcagtcatgtggtcatgggctcacggtccaatgtccatgcccaaaacacaactaaggacccagtggtcagaaccaaggcctgatgatcagagacaatacacactgctcagagctgaatttcagtggcaaggatgaagacataatgataaagactagggatcagtgagcagaaccagcgatgaggacccagacgcatctctgaagactagagtcagtgaccatgaccagttcaacgatcatgagtaggacttaattctgatcatacgagttcagtgatcacgaacaaggctcagtgatcatgacaagggctcagggaacaagagtgaggctcagcgatgaaaactggacctcagttatgagcccagtgatgagtaaccaggtctcggtcattagggccaggattcagtgataagaaccaagggtctctgcagggctcagtgcatcctctccccctgagactggacaaagccgcccagccacagggatggattctccagacaggcaacagcttcagggacagcccccccgtgatgcgccagagtaggggatacccaggggacttccacactctcaaagaagaaggggagaatggaacatgaagaagggactgtgaggggggaccgggaagtgggggacacagtgactgggatataaagtgaataaataaattaatggaaaatatcacatgggtgtagggaattttgaaagaataaataaaatgttaaaaatgaaaagaaaaaaagaccaagggtcaatgatcagggtgataataaataaataaataaataaataaataaataaataaataaataaataagaaaggaaagagagaaagaaaggaaggaagaaagaaagaaagaaagaaagaaagaaagaaagaaagaaagaacaaacgaactgaatgtcagaatttagggtaagatctcagtgatgaggatcagggatcagtggtttgaacgcagacacactgcccagggccattgttcaatgacgagagtcagggatcagctatcagaaccagggccagtaacgaaagccagggcccagtgaccccaaccaaaaaccagtgactaaaaccaaataaaatagaaactaggcagccacgatggtgcacacctttaatcccagaactcaggagtcaggggcagggggagttcaagacaaccctggtctacacagtgagttccaagacagccagggctacccagagaaaccctgtctagataacaaagactagaaaccatgagctcagtgatcagtggcagttcttgatgactaagaccatggtcaagaggactgatcagcaggactcagtggttagactcaggacatggtgatgatagcctctgttccagggatcagaaccaaggccaagggccaaggccatgactgagtcatcagaacagggcctctccatgagcactagtcaggcgcagccaggcctagcatgtcaatcaggcaaaattgggtatgtgtgtggtggtatgactgactatacatcgtcttagtatctgtctgaccccaccaccatcttccctgcctccgtccactcacagatctctgacgcgtcaccgcagggtaataactgatataattaaattgaagctctaatttgtgagtttagtatacatgcatttacttataatacagttttttagttttgctggccgcatcttctcaaatatgcttcccagcctgcttttctgtaacgttcaccctctaccttagcatcccttccctttgcaaatagtcctcttccaacaataataatgtcagatcctgtagagaccacatcatccacggttctatactgttgacccaatgcgtctcccttgtcatctaaacccacaccgggtgtcataatcaaccaatcgtaaccttcatctcttccacccatgtctctttgagcaataaagccgataacaaaatctttgtcgctcttcgcaatgtcaacagtacccttagtatattctccagtagatagggagcccttgcatgacaattctgctaacatcaaaaggcctctaggttcctttgttacttcttctgccgcctgcttcaaaccgctaacaatacctgggcccaccacaccgtgtgcattcgtaatgtctgcccattctgctattctgtatacacccgcagagtactgcaatttgactgtattaccaatgtcagcaaattttctgtcttcgaagagtaaaaaattgtacttggcggataatgcctttagcggcttaactgtgccctccatggaaaaatcagtcaagatatccacatgtgtttttagtaaacaaattttgggacctaatgcttcaactaactccagtaattccttggtggtacgaacatccaatgaagcacacaagtttgtttgcttttcgtgcatgatattaaatagcttggcagcaacaggactaggatgagtagcagcacgttccttatatgtagctttcgacatgatttatcttcgtttcctgcaggtttttgttctgtgcagttgggttaagaatactgggcaatttcatgtttcttcaacactacatatgcgtatatataccaatctaagtctgtgctccttccttcgttcttccttctgttcggagattaccgaatcaaaaaaatttcaaagaaaccgaaatcaaaaaaaagaataaaaaaaaaatgatgaattgaattgaaaagcgtggtgcactctcagtacaatctgctctgatgccgcatagttaagccagccccgacacccgccaacacccgctgacgcgaaccccttgcggcc

SEQ ID NO: 12 - DNA, 27 bp, synthetic construct
  source 1..27: mol_type = other DNA
ggggccaaggccccgagagatctcagg

SEQ ID NO: 13 - DNA, 25 bp, synthetic construct
  source 1..25: mol_type = other DNA
cactgggttcagggttctttccacc

SEQ ID NO: 14 - DNA, 31 bp, synthetic construct
  source 1..31: mol_type = other DNA
gtggtacagaagttagaggggatgttgttcc

SEQ ID NO: 15 - DNA, 30 bp, synthetic construct
  source 1..30: mol_type = other DNA
tcttctacaagcccttctaagaacacctgg

SEQ ID NO: 16 - DNA, 25 bp, synthetic construct
  source 1..25: mol_type = other DNA
agcacaatgctgaggatgttgctcc

SEQ ID NO: 17 - DNA, 26 bp, synthetic construct
  source 1..26: mol_type = other DNA
actgaccctgatcctgaccctactgc

SEQ ID NO: 18 - DNA, 24 bp, synthetic construct
  source 1..24: mol_type = other DNA
aaacacccctcttctcccaccagc

SEQ ID NO: 19 - DNA, 24 bp, synthetic construct
  source 1..24: mol_type = other DNA
cgctcatggtgaaccagtgctctg

SEQ ID NO: 20 - DNA, 25 bp, synthetic construct
  source 1..25: mol_type = other DNA
gctatttaagacccactccctggca

SEQ ID NO: 21 - DNA, 25 bp, synthetic construct
  source 1..25: mol_type = other DNA
gctatttaagacccactccctggca

SEQ ID NO: 22 - DNA, 27 bp, synthetic construct
  source 1..27: mol_type = other DNA
gctccttcagcacatttcctacctgga

SEQ ID NO: 23 - DNA, 28 bp, synthetic construct
  source 1..28: mol_type = other DNA
ccatatatggcaaaatgagtcatgcagg

SEQ ID NO: 24 - DNA, 30 bp, synthetic construct
  source 1..30: mol_type = other DNA
ctctgctgctcctcaccctcctcactcagg

SEQ ID NO: 25 - DNA, 30 bp, synthetic construct
  source 1..30: mol_type = other DNA
gagagtgctgctgcttgtatatgagctgca

SEQ ID NO: 26 - DNA, 31 bp, synthetic construct
  source 1..31: mol_type = other DNA
tggctcactctcctcactctttgcataggtt

SEQ ID NO: 27 - DNA, 30 bp, synthetic construct
  source 1..30: mol_type = other DNA
gatggttaccactgctgtcccgggagttac

SEQ ID NO: 28 - DNA, 32 bp, synthetic construct
  source 1..32: mol_type = other DNA
atccctctcctgctccccctcctcattctctg

SEQ ID NO: 29 - DNA, 32 bp, synthetic construct
  source 1..32: mol_type = other DNA
tgatggtcaaggtgactgtggtccctgagctg

SEQ ID NO: 30 - DNA, 18 bp, synthetic construct
  source 1..18: mol_type = other DNA
aacaagtgcgtggagcag

SEQ ID NO: 31 - DNA, 23 bp, synthetic construct
  source 1..23: mol_type = other DNA
gtactgttgacattgcgaagagc

SEQ ID NO: 32 - DNA, 21 bp, synthetic construct
  source 1..21: mol_type = other DNA
tggttgacatgctggctagtc

SEQ ID NO: 33 - DNA, 20 bp, synthetic construct
  source 1..20: mol_type = other DNA
tgtctggctggaatacactc

SEQ ID NO: 34 - DNA, 90 bp, synthetic construct
  source 1..90: mol_type = other DNA
aaatgagcttcaaattgagaagtgacgcaagcatcaatggtataatgtccagagttgtgaggccttggggactgtgtgccgaacatgctc

SEQ ID NO: 35 - DNA, 90 bp, synthetic construct
  source 1..90: mol_type = other DNA
ccagcactgttcaatcacagtatgatgagcctaatgggaatcccactaggctagtctagtcaccacattaaagcacgtggcctcttatcg

SEQ ID NO: 36 - DNA, 20 bp, synthetic construct
  source 1..20: mol_type = other DNA
tgaccattgcttccaagtcc

SEQ ID NO: 37 - DNA, 25 bp, synthetic construct
  source 1..25: mol_type = other DNA
gaggaaagagagaaaccacaggtgc

SEQ ID NO: 38 - DNA, 25 bp, synthetic construct
  source 1..25: mol_type = other DNA
cacccaagggcagaactttgttact

SEQ ID NO: 39 - DNA, 28 bp, synthetic construct
  source 1..28: mol_type = other DNA
tgtccaggtatgttgaagaatgtcctcc

SEQ ID NO: 40 - DNA, 26 bp, synthetic construct
  source 1..26: mol_type = other DNA
tggactctgttcaactgaggcaccag

SEQ ID NO: 41 - DNA, 24 bp, synthetic construct
  source 1..24: mol_type = other DNA
ggccttcatgctgtgtgcagacta

SEQ ID NO: 42 - DNA, 27 bp, synthetic construct
  source 1..27: mol_type = other DNA
caggtcgcactgattcaagaagtgagt

SEQ ID NO: 43 - DNA, 26 bp, synthetic construct
  source 1..26: mol_type = other DNA
ttcaggcaggctcttaccaggactca

SEQ ID NO: 44 - DNA, 28 bp, synthetic construct
  source 1..28: mol_type = other DNA
tgctctgacctctgaggacctgtctgta

SEQ ID NO: 45 - DNA, 23 bp, synthetic construct
  source 1..23: mol_type = other DNA
tcacgtgactgtgatccctagaa

SEQ ID NO: 46 - DNA, 23 bp, synthetic construct
  source 1..23: mol_type = other DNA
cactgttatgccaactgaacagc

SEQ ID NO: 47 - DNA, 23 bp, synthetic construct
  source 1..23: mol_type = other DNA
cgtagcagtccccatctgtaatc

SEQ ID NO: 48 - DNA, 23 bp, synthetic construct
  source 1..23: mol_type = other DNA
atgtcagaggagcaggagagaga

SEQ ID NO: 49 - DNA, 23 bp, synthetic construct
  source 1..23: mol_type = other DNA
cacgcctcacatccaatatgtta

SEQ ID NO: 50 - DNA, 23 bp, synthetic construct
  source 1..23: mol_type = other DNA
ataccctcctgacatctggtgaa

SEQ ID NO: 51 - DNA, 30 bp, synthetic construct
  source 1..30: mol_type = other DNA
gctttcagtgatggtcagtgtgcttatgac

SEQ ID NO: 52 - DNA, 28 bp, synthetic construct
  source 1..28: mol_type = other DNA
tggaagaccaggagatattcagggtgtc

SEQ ID NO: 53 - DNA, 25 bp, synthetic construct
  source 1..25: mol_type = other DNA
ttgcttaactccacacctgctcctg

SEQ ID NO: 54 - DNA, 24 bp, synthetic construct
  source 1..24: mol_type = other DNA
tgcttggaactggatcaggcagtc

SEQ ID NO: 55 - DNA, 19 bp, synthetic construct
  source 1..19: mol_type = other DNA
caccctggtcaccgtctcc

SEQ ID NO: 56 - DNA, 21 bp, synthetic construct
  source 1..21: mol_type = other DNA
agacagtgaccagggtgccac

SEQ ID NO: 57 - DNA, 24 bp, synthetic construct
  source 1..24: mol_type = other DNA
tgaggaacggatcctggttcagtc

SEQ ID NO: 58 - DNA, 21 bp, synthetic construct
  source 1..21: mol_type = other DNA
atctcctcagcccagcacagc

SEQ ID NO: 59 - DNA, 21 bp, synthetic construct
  source 1..21: mol_type = other DNA
cctcccatgattccaacactg

SEQ ID NO: 60 - DNA, 20 bp, synthetic construct
  source 1..20: mol_type = other DNA
ctcaccgtccaccactgctg

SEQ ID NO: 61 - DNA, 100 bp, synthetic construct
  source 1..100: mol_type = other DNA
ctgtgccacaaacatgcaaagataagttccatgtgacaagtctgaactcagtgttggaatcatgggaggcggccgcgttatctatgctgtctcaccatag

SEQ ID NO: 62 - DNA, 20 bp, synthetic construct
  source 1..20: mol_type = other DNA
tgctcaggcgtcaggctcag

SEQ ID NO: 63 - DNA, 20 bp, synthetic construct
  source 1..20: mol_type = other DNA
tgctcaggcgtcaggctcag

SEQ ID NO: 64 - DNA, 22 bp, synthetic construct
  source 1..22: mol_type = other DNA
atggactggacctggaggatcc

SEQ ID NO: 65 - DNA, 20 bp, synthetic construct
  source 1..20: mol_type = other DNA
tccacgctcctgctgctgac

SEQ ID NO: 66 - DNA, 21 bp, synthetic construct
  source 1..21: mol_type = other DNA
atggagtttgggctgagctgg

SEQ ID NO: 67 - DNA, 21 bp, synthetic construct
  source 1..21: mol_type = other DNA
tgaaacacctgtggttcttcc

SEQ ID NO: 68 - DNA, 21 bp, synthetic construct
  source 1..21: mol_type = other DNA
tcatcttcctgcccgtgctgg

SEQ ID NO: 69 - DNA, 20 bp, synthetic construct
  source 1..20: mol_type = other DNA
gactcgactcttgagggacg

SEQ ID NO: 70 - DNA, 20 bp, synthetic construct
  source 1..20: mol_type = other DNA
atgtggccacaggctagctc

SEQ ID NO: 71 - DNA, 18 bp, synthetic construct
  source 1..18: mol_type = other DNA
atgagggtccccgctcag

SEQ ID NO: 72 - DNA, 19 bp, synthetic construct
  source 1..19: mol_type = other DNA
atggaagccccagctcagc

SEQ ID NO: 73 - DNA, 20 bp, synthetic construct
  source 1..20: mol_type = other DNA
cctgggagttacccgattgg

SEQ ID NO: 74 - DNA, 31 bp, synthetic construct
  source 1..31: mol_type = other DNA
ggcgcgccaagcatcatgtcctacctggctg

SEQ ID NO: 75 - DNA, 96 bp, synthetic construct
  source 1..96: mol_type = other DNA
caaagtacgtggcacctccctcgtctttcttcctcctgctccagccaggtaggacatgatgcttggcgcgccgttatctatgctgtctcaccatag

SEQ ID NO: 76 - DNA, 20 bp, synthetic construct
  source 1..20: mol_type = other DNA
cagtgccagcctcgtctcat

SEQ ID NO: 77 - DNA, 20 bp, synthetic construct
  source 1..20: mol_type = other DNA
aggggccatccacagtcttc

SEQ ID NO: 78 - DNA, 24 bp, synthetic construct
  source 1..24: mol_type = other DNA
cttcactgtgtgttcttgggatac

SEQ ID NO: 79 - DNA, 30 bp, synthetic construct
  source 1..30: mol_type = other DNA
gtgtaatgctttggacggtgtgttagtctc

SEQ ID NO: 80 - DNA, 38 bp, synthetic construct
  source 1..38: mol_type = other DNA
gcatagcggcgcgccaagcatcatgtcctacctggctg

SEQ ID NO: 81 - DNA, 22 bp, synthetic construct
  source 1..22: mol_type = other DNA
gacatgagagtcctcgctcagc

SEQ ID NO: 82 - DNA, 18 bp, synthetic construct
  source 1..18: mol_type = other DNA
aagccccagcgcagcttc

SEQ ID NO: 83 - DNA, 21 bp, synthetic construct
  source 1..21: mol_type = other DNA
atggtgttgcagacccaggtc

SEQ ID NO: 84 - DNA, 21 bp, synthetic construct
  source 1..21: mol_type = other DNA
gtcccaggttcacctcctcag

SEQ ID NO: 85 - DNA, 21 bp, synthetic construct
  source 1..21: mol_type = other DNA
tcctcasyctcctcactcagg

SEQ ID NO: 86 - DNA, 20 bp, synthetic construct
  source 1..20: mol_type = other DNA
cgtccttgcttactgcacag

SEQ ID NO: 87 - DNA, 22 bp, synthetic construct
  source 1..22: mol_type = other DNA
agcctccttgctcactttacag

SEQ ID NO: 88 - DNA, 20 bp, synthetic construct
  source 1..20: mol_type = other DNA
cctcctcaytytctgcacag

SEQ ID NO: 89 - DNA, 22 bp, synthetic construct
  source 1..22: mol_type = other DNA
gctcactctcctcactctttgc

SEQ ID NO: 90 - DNA, 20 bp, synthetic construct
  source 1..20: mol_type = other DNA
cctcctctctcactgcacag

SEQ ID NO: 91 - DNA, 20 bp, synthetic construct
  source 1..20: mol_type = other DNA
gccacactcctgctcccact

SEQ ID NO: 92 - DNA, 21 bp, synthetic construct
  source 1..21: mol_type = other DNA
atggcctgggtctccttctac

SEQ ID NO: 93 - DNA, 84 bp, synthetic construct
  source 1..84: mol_type = other DNA
attactactactactactacatggacgtctggggcaaagggaccacggtcaccgtctcctcaggaagaatggcctctccaggtc

SEQ ID NO: 94 - DNA, 28 bp, synthetic construct
  source 1..28: mol_type = other DNA
ctgtcgttgagatgaaccccaatgtgag

SEQ ID NO: 95 - DNA, 89 bp, synthetic construct
  source 1..89: mol_type = other DNA
ggaactgatgtgatctcagtcacacagctaatgcaaaggtcagcaggctgtttactgcctggaggttcatcgcccaattccaaagtcac

SEQ ID NO: 96 - DNA, 25 bp, synthetic construct
  source 1..25: mol_type = other DNA
ctagtctgcatgggtctccgcaaac

SEQ ID NO: 97 - DNA, 92 bp, synthetic construct
  source 1..92: mol_type = other DNA
ctggtataatcataagtctccacttaatagttctgtagacagaatcttcatttagacttacagaccgcggccgcaccgcagggtaataactg

SEQ ID NO: 98 - DNA, 83 bp, synthetic construct
  source 1..83: mol_type = other DNA
gcaacccttcttgccactcatgtcccagctctcaccatgtgacatagcctgttaacaattcggtcgaaaaaagaaaaggagag

SEQ ID NO: 99 - DNA, 83 bp, synthetic construct
  source 1..83: mol_type = other DNA
aatgttcttagtatatataaacaagctactcccaattcatagtcaactaagttaacattccacatgttaaaatagtgaaggag

SEQ ID NO: 100 - DNA, 86 bp, synthetic construct
  source 1..86: mol_type = other DNA
ttaacaggctatgtcacatggtgagagctgggacatgagtggcaagaagggttgccagactccccctttacctctatatcgtgttc

SEQ ID NO: 101 - DNA, 86 bp, synthetic construct
  source 1..86: mol_type = other DNA
cttagttgactatgaattgggagtagcttgtttatatatactaagaacatttgtcagaagctctttcttgtttattcccagtttgc

SEQ ID NO: 102 - DNA, 22 bp, synthetic construct
  source 1..22: mol_type = other DNA
catgtccgtatgttgcatctgc

SEQ ID NO: 103 - DNA, 19 bp, synthetic construct
  source 1..19: mol_type = other DNA
gggaagatgaagacagatg

SEQ ID NO: 104 - DNA, 17 bp, synthetic construct
  source 1..17: mol_type = other DNA
tggagtggattgggagt

SEQ ID NO: 105 - DNA, 28 bp, synthetic construct
  source 1..28: mol_type = other DNA
gcgatcgcaaagacgaaagggcctcgtg

SEQ ID NO: 106 - DNA, 27 bp, synthetic construct
  source 1..27: mol_type = other DNA
acctggtgatcgccaacaaatactacc

SEQ ID NO: 107 - DNA, 39 bp, synthetic construct
  source 1..39: mol_type = other DNA
gcggtgggtctcccacgggggcaaacagcagtggtggac

SEQ ID NO: 108 - DNA, 108 bp, synthetic construct
  source 1..108: mol_type = other DNA
ggtgagcgtacggttatctatgctgtctcaccatagctgtcagctggaagcagttaaggttggcctttgtctgtattcgtacgcacacgcttttcaattcaattcatc

What is claimed is:

1. A polyclonal antiserum composition comprising a repertoire of antigen-specific artificial immunoglobulins, each antigen-specific artificial immunoglobulin comprising:
(a) one or more human heavy chain V_{H} segment(s);
(b) one or more D segment(s);
(c) one or more J segment(s); and
(d) one or more constant region segment(s);
wherein said one or more human heavy chain V_{H} segment(s) of a first artificial immunoglobulin are encoded by a plurality of artificial immunoglobulin heavy chain gene loci located at a plurality of chromosomal sites, wherein the one or more human heavy chain V_{H} segment(s) in the first artificial immunoglobulin are selected from the group consisting of: IgHV3-74, IgHV3-73, IgHV3-72, IgHV2-70, IgHV1-69, IgHV3-66, IgHV3-64, IgHV4-61, IgHV4-59, IgHV1-58, IgHV3-53, IgHV5-51, IgHV3-49, IgHV3-48, IgHV1-46, IgHV1-45, IgHV3-43, IgHV3-21, IgHV3-20, IgHV1-18, IgHV3-15, IgHV3-13, IgHV6-1;
wherein said one or more human heavy chain V_{H} segment(s) of a second artificial immunoglobulin are encoded by a plurality of artificial immunoglobulin heavy chain gene loci located at a plurality of chromosomal sites, wherein the one or more human heavy chain V_{H} segment(s) in the second artificial immunoglobulin are selected from the group consisting of: IgHV4-39, IgHV3-38, IgHV3-35, IgHV4-34, IgHV3-33, IgHV4-31, IgHV3-30, IgHV4-28, IgHV2-26, IgHV1-24, IgHV3-23, IgHV3-22-2, IgHV3-11, IgHV3-9, IgHV1-8, IgHV3-7, IgHV2-5, IgHV7-4, IgHV4-4, IgHV1-3, IgHV1-2 and IgHV6-1; and
wherein said artificial immunoglobulin heavy chain gene loci are functional and capable of undergoing gene rearrangement.

2. The polyclonal serum according to claim 1, wherein the one or more human heavy chain V_{H} segment(s) in the first artificial immunoglobulin are arranged in an HC30 locus as illustrated in FIG. 1B.

3. The polyclonal serum according to claim 1, wherein the one or more human heavy chain V_{H} segment(s) in the second artificial immunoglobulin are arranged in an HC14 locus as illustrated in FIG. 1A.

4. The polyclonal serum according to claim 1, wherein the one or more constant region segment(s) comprise a rat constant region spanning from Eμ to a rat 3′ enhancer sequence.

5. The polyclonal serum according to claim 1, wherein the one or more constant region segment(s) comprise human constant region sequences.

6. The polyclonal serum according to claim 1, wherein the constant region gene comprises a constant region gene selected from the group consisting of Cμ and Cγ.

7. The polyclonal serum according to claim 1, wherein the rat 3′ enhancer comprises the sequence set forth in SEQ ID NO: 1.
